(19) United States
(12) Patent Application Publication
(10) Pub. No.: US 2023/0075877 A1
(43) Pub. Date: Mar. 9, 2023

(54) NOVEL NUCLEOBASE EDITORS AND METHODS OF USING SAME

(71) Applicant: Beam Therapeutics Inc., Cambridge, MA (US)

(72) Inventors: Nicole GAUDELLI, Cambridge, MA (US); Michael PACKER, Cambridge, MA (US)

(73) Assignee: Beam Therapeutics Inc., Cambridge, MA (US)

(21) Appl. No.: 17/641,343

(22) PCT Filed: Sep. 9, 2020
(86) PCT No.: PCT/US20/49975

§ 371 Date: Mar. 8, 2022

Related U.S. Application Data
(63) Continuation-in-part of application No. PCT/US2020/018195, filed on Feb. 13, 2020.
(60) Provisional application No. 62/897,777, filed on Sep. 9, 2019.

(51) Int. Cl. C12N 9/78; C12N 9/22; C12N 15/10

(52) U.S. Cl. CPC C12N 9/78; C12Y 305/04004; C12N 9/22; C12N 15/102; C12N 2310/20; A61K 48/00

(57) ABSTRACT

The invention features novel programmable nucleobase editors comprising adenosine deaminase domains and methods of using the same for polynucleotide editing. In some embodiments, programmable nucleobase editors edit a pathogenic mutation associated with a genetic disease.

### CROSS REFERENCE TO RELATED APPLICATIONS

[0001] This application is an International PCT Application which claims priority to and benefit of U.S. Provisional Application No. 62/897,777, filed Sep. 9, 2019; and which claims priority to International PCT Application No. PCT/US2020/018195, filed Feb. 13, 2020, the contents of all of which are incorporated by reference herein in their entireties.

### BACKGROUND OF THE INVENTION

[0002] Targeted editing of nucleic acid sequences, for example, the targeted cleavage or the targeted introduction of a specific modification into genomic DNA is a highly promising approach for the study of gene function and also has the potential to provide new therapies for human genetic diseases. Currently available base editors include cytidine base editors (e.g., BE4) that convert target C•G base pairs to T•A and adenine base editors (e.g., ABE7.10) that convert A•T to G•C. There is a need in the art for improved base editors capable of inducing modifications within a target sequence with greater specificity and efficiency.

### SUMMARY OF THE INVENTION

[0003] As described below, the present invention features novel programmable nucleobase editors comprising adenosine deaminase domains (e.g., TadA*9 or ABE9), and methods of using the same for polynucleotide editing. In some embodiments, ABE9 of the invention edits a polynucleotide, e.g., a polynucleotide comprising a pathogenic mutation associated with a genetic disease.

[0004] In an aspect, an adenosine deaminase comprising an alteration at an amino acid position selected from the group consisting of 21, 23, 25, 38, 51, 54, 70, 71, 72, 73, 94, 124, 133, 139, 146, and 158 of SEQ ID NO: 1, or a corresponding alteration in another adenosine deaminase:

```
(SEQ ID NO: 1)
                10 20 30 40
MSEVEFSHEY WMRHALTLAK RARDEREVPV GAVLVLNNRV
                50 60 70 80
IGEGWNRAIG LHDPTAHAEI MALRQGGLVM QNYRLIDATL
                90 100 110 120
YVTFEPCVMC AGAMIHSRIG RVVFGVRNAK TGAAGSLMDV
              130 140 150 160
LHYPGMNHRV EITEGILADE CAALLCYFFR MPRQVFNAQK
KAQSSTD
```

is provided. In an embodiment, the adenosine deaminase comprises an alteration selected from the group consisting of R21N, R23H, E25F, N38G, L51W, P54C, M70V, Q71M, N72K, Y73S, M94V, P124W, T133K, D139L, D139M, C146R, and A158K of SEQ ID NO: 1, or a corresponding alteration in another adenosine deaminase. In an embodiment, the adenosine deaminase further comprises a V82T alteration of SEQ ID NO: 1, or a corresponding alteration in another adenosine deaminase. In an embodiment, the adenosine deaminase comprises alterations at two or more amino acid positions selected from the group consisting of 21, 23, 25, 38, 51, 54, 70, 71, 72, 73, 94, 124, 133, 139, 146, and 158 of SEQ ID NO: 1, or a corresponding alteration in another adenosine deaminase. In an embodiment, the adenosine deaminase of this aspect and embodiments thereof comprises two or more of the alterations. In an embodiment, the adenosine deaminase of this aspect and embodiments thereof comprises three or more of said alterations. In an embodiment, the adenosine deaminase of this aspect and embodiments thereof further comprises one or more of the following alterations: Y147T, Y147R, Q154S, Y123H, and Q154R. In an embodiment, the adenosine deaminase of this aspect and embodiments thereof comprises any one of the following groups of alterations:

### E25F+V82S+Y123H;

### T133K+Y147R+Q154R;

### E25F+V82S+Y123H+Y147R+Q154R;

### L51W+V82S+Y123H+C146R+Y147R+Q154R;

### Y73S+V82S+Y123H+Y147R+Q154R;

### P54C+V82S+Y123H+Y147R+Q154R;

### N38G+V82T+Y123H+Y147R+Q154R;

### N72K+V82S+Y123H+D139L+Y147R+Q154R;

### E25F+V82S+Y123H+D139M+Y147R+Q154R;

### Q71M+V82S+Y123H+Y147R+Q154R;

### E25F+V82S+Y123H+T133K+Y147R+Q154R;

### E25F+V82S+Y123H+Y147R+Q154R;

### V82S+Y123H+P124W+Y147R+Q154R;

### L51W+V82S+Y123H+C146R+Y147R+Q154R;

### P54C+V82S+Y123H+Y147R+Q154R;

### Y73S+V82S+Y123H+Y147R+Q154R;

### N38G+V82T+Y123H+Y147R+Q154R;

### R23H+V82S+Y123H+Y147R+Q154R;

### R21N+V82S+Y123H+Y147R+Q154R;

### V82S+Y123H+Y147R+Q154R+A158K;

### N72K+V82S+Y123H+D139L+Y147R+Q154R;

### E25F+V82S+Y123H+D139M+Y147R+Q154R;

### M70V+V82S+M94V+Y123H+Y147R+Q154R;

### Q71M+V82S+Y123H+Y147R+Q154R;

### E25F+I76Y+V82S+Y123H+Y147R+Q154R;

### I76Y+V82T+Y123H+Y147R+Q154R;

### N38G+I76Y+V82S+Y123H+Y147R+Q154R;

### R23H+I76Y+V82S+Y123H+Y147R+Q154R;

### P54C+I76Y+V82S+Y123H+Y147R+Q154R;

### R21N+I76Y+V82S+Y123H+Y147R+Q154R;

### I76Y+V82S+Y123H+D139M+Y147R+Q154R;

### Y73S+I76Y+V82S+Y123H+Y147R+Q154R;

### E25F+I76Y+V82S+Y123H+Y147R+Q154R;

### I76Y+V82T+Y123H+Y147R+Q154R;

### N38G+I76Y+V82S+Y123H+Y147R+Q154R;

### R23H+I76Y+V82S+Y123H+Y147R+Q154R;

### P54C+I76Y+V82S+Y123H+Y147R+Q154R;

### R21N+I76Y+V82S+Y123H+Y147R+Q154R;

### I76Y+V82S+Y123H+D139M+Y147R+Q154R;

### Y73S+I76Y+V82S+Y123H+Y147R+Q154R;

### V82S+Q154R;

### N72K+V82S+Y123H+Y147R+Q154R;

### Q71M+V82S+Y123H+Y147R+Q154R;

### V82S+Y123H+T133K+Y147R+Q154R;

### V82S+Y123H+T133K+Y147R+Q154R+A158K;

### M70V+Q71M+N72K+V82S+Y123H+Y147R+Q154R;

### N72K V82S+Y123H+Y147R+Q154R;

### Q71M V82S+Y123H+Y147R+Q154R;

### M70V+V82S+M94V+Y123H+Y147R+Q154R;

### V82S+Y123H+T133K+Y147R+Q154R;

### V82S+Y123H+T133K+Y147R+Q154R+A158K; or

[0005] M70V+Q71M+N72K+V82S+Y123H+Y147R+Q154R. In an embodiment, the adenosine deaminase variant comprises any alteration or group of alterations as described in Table 14 or 18. In an embodiment, the adenosine deaminase of this aspect and embodiments thereof comprises a deletion of the C terminus beginning at a residue selected from the group consisting of 149, 150, 151, 152, 153, 154, 155, 156, and 157. In an embodiment, the adenosine deaminase of this aspect and embodiments thereof further comprises an alteration selected from the group consisting of Y147T, Y147R, Q154S, Y123H, V82S, T166R, and Q154R. In an embodiment, the adenosine deaminase of this aspect and embodiments thereof is an adenosine deaminase variant described in Table 14, Table 18, or FIGS. 3A-3C.

[0006] In another aspect, a fusion protein is provided, in which the fusion protein comprises a polynucleotide programmable DNA binding domain and at least one base editor domain that is an adenosine deaminase variant comprising an alteration at an amino acid position selected from the group consisting of 21, 23, 25, 38, 51, 54, 70, 71, 72, 73, 94, 124, 133, 139, 146, and 158 of the below SEQ ID NO: 1, or a corresponding alteration in another adenosine deaminase:

```
(SEQ ID NO: 1)
                10 20 30 40
MSEVEFSHEY WMRHALTLAK RARDEREVPV GAVLVLNNRV
                50 60 70 80
IGEGWNRAIG LHDPTAHAEI MALRQGGLVM QNYRLIDATL
                90 100 110 120
YVTFEPCVMC AGAMIHSRIG RVVFGVRNAK TGAAGSLMDV
              130 140 150 160
LHYPGMNHRV EITEGILADE CAALLCYFFR MPRQVFNAQK
KAQSSTD
```

In an embodiment, the adenosine deaminase variant comprises an alteration selected from the group consisting of R21N, R23H, E25F, N38G, L51W, P54C, M70V, Q71M, N72K, Y73S, M94V, P124W, T133K, D139L, D139M, C146R, and A158K of SEQ ID NO: 1, or a corresponding alteration in another adenosine deaminase.

[0007] In another aspect, a fusion protein is provided, in which the fusion protein comprises a polynucleotide programmable DNA binding domain and at least one base editor domain that is an adenosine deaminase variant comprising an alteration selected from the group consisting of R21N, R23H, E25F, N38G, L51W, P54C, M70V, Q71M, N72K, Y73S, M94V, P124W, T133K, D139L, D139M, C146R, and A158K of SEQ ID NO: 1, or a corresponding alteration in another adenosine deaminase.

[0008] In an embodiment of any of fusion protein of any of the above-delineated aspects and embodiments thereof, the adenosine deaminase variant further comprises a V82T alteration of SEQ ID NO: 1, or a corresponding alteration in another adenosine deaminase.

[0009] In another aspect, a fusion protein is provided, in which the fusion protein comprises a polynucleotide programmable DNA binding domain and at least one base editor domain that is an adenosine deaminase variant comprising an alteration V82T and one or more alterations selected from the group consisting of R21N, R23H, E25F, N38G, L51W, P54C, M70V, Q71M, N72K, Y73S, M94V, P124W, T133K, D139L, D139M, C146R, and A158K of SEQ ID NO: 1, or a corresponding alteration in another adenosine deaminase.

[0010] In an embodiment of the fusion proteins of any of the above-delineated aspects and embodiments thereof, the adenosine deaminase variant comprises alterations at two or more amino acid positions selected from the group consisting of 21, 23, 25, 38, 51, 54, 70, 71, 72, 73, 94, 124, 133, 139, 146, and 158 of SEQ ID NO: 1, or a corresponding alteration in another adenosine deaminase. In an embodiment, the adenosine deaminase variant comprises two or more of the alterations. In an embodiment, the adenosine deaminase variant comprises three or more of the alterations. In an embodiment, the adenosine deaminase variant further comprises one or more of the following alterations: Y147T, Y147R, Q154S, Y123H, and Q154R. In an embodiment, the adenosine deaminase variant comprises a deletion of the C terminus beginning at a residue selected from the group consisting of 149, 150, 151, 152, 153, 154, 155, 156, and 157.

[0011] In an embodiment of the above-delineated fusion proteins and embodiments thereof, the base editor domain comprises an adenosine deaminase variant monomer, wherein the adenosine deaminase monomer comprises one or more alterations selected from the group consisting of R21N, R23H, E25F, N38G, L51W, P54C, M70V, Q71M, N72K, Y73S, V82T, M94V, P124W, T133K, D139L, D139M, C146R, and A158K of SEQ ID NO: 1. In an embodiment, the base editor domain comprises an adenosine deaminase heterodimer comprising a wild-type adenosine deaminase domain and an adenosine deaminase variant. In an embodiment, the adenosine deaminase variant further comprises an alteration selected from the group consisting of Y147T, Y147R, Q154S, Y123H, V82S, T166R, and Q154R. In an embodiment, the base editor domain comprises an adenosine deaminase heterodimer comprising a TadA*7.10 domain and adenosine deaminase variant domain. In an embodiment, the adenosine deaminase variant comprises two or more alterations.

[0012] In another embodiment of the fusion proteins of any of the above-delineated aspects and embodiments thereof, the adenosine deaminase variant is an ABE9 (TadA*9 deaminase variant) described in Table 14, Table 18, or FIGS. 3A-3C.

[0013] In another embodiment of the fusion proteins of any of the above-delineated aspects and embodiments thereof, the adenosine deaminase variant is a truncated ABE8 or ABE9 that is missing 1, 2, 3, 4, 5, 6, 7, 8, 9, 10, 11, 12, 13, 14, 15, 6, 17, 18, 19, or 20 C-terminal amino acid residues relative to the full length ABE9.

[0014] In another embodiment of the fusion proteins of any of the above-delineated aspects and embodiments thereof, the polynucleotide programmable DNA binding domain is a Cas9, Cas12a/Cpf1, Cas12b/C2c1, Cas12c/C2c3, Cas12d/CasY, Cas12e/CasX, Cas12g, Cas12h, Cas12i, or Cas12j/CasΦ domain.

[0015] In another aspect, a fusion protein is provided, in which the fusion protein comprises a polynucleotide programmable DNA binding domain comprising the following sequence:

EIGKATAKYFFYSNIMNFFKTEITLANGEIRKRPLIETNGETGEIVWDKG
RDFATVRKVLSMPQVNIVKKTEVQTGGFSKESILPKRNSDKLIARKKDWD
PKKYGGFMQPTVAYSVLVVAKVEKGKSKKLKSVKELLGITIMERSSFEKN
PIDFLEAKGYKEVKKDLIIKLPKYSLFELENGRKRMLASAKFLQKGNELA
LPSKYVNFLYLASHYEKLKGSPEDNEQKQLFVEQHKHYLDEIIEQISEFS
KRVILADANLDKVLSAYNKHRDKPIREQAENIIHLFTLTNLGAPRAFKYF
DTTIARKEYRSTKEVLDATLIHQSITGLYETRIDLSQLGGDGGSGGSGGS
GGSGGSGGSGGMDKKYSIGLAIGTNSVGWAVITDEYKVPSKKFKVLGNTD
RHSIKKNLIGALLFDSGETAEATRLKRTARRRYTRRKNRICYLQEIFSNE
MAKVDDSFFHRLEESFLVEEDKKHERHPIFGNIVDEVAYHEKYPTIYHLR
KKLVDSTDKADLRLIYLALAHMIKFRGHFLIEGDLNPDNSDVDKLFIQLV
QTYNQLFEENPINASGVDAKAILSARLSKSRRLENLIAQLPGEKKNGLFG
NLIALSLGLTPNFKSNFDLAEDAKLQLSKDTYDDDLDNLLAQIGDQYADL
FLAAKNLSDAILLSDILRVNTEITKAPLSASMIKRYDEHHQDLTLLKALV
RQQLPEKYKEIFFDQSKNGYAGYIDGGASQEEFYKFIKPILEKMDGTEEL
LVKLNREDLLRKQRTFDNGSIPHQIHLGELHAILRRQEDFYPFLKDNREK
IEKILTFRIPYYVGPLARGNSRFAWMTRKSEETITPWNFEEVVDKGASAQ
SFIERMTNFDKNLPNEKVLPKHSLLYEYFTVYNELTKVKYVTEGMRKPAF
LSGEQKKAIVDLLFKTNRKVTVKQLKEDYFKKIECFDSVEISGVEDRFNA
SLGTYHDLLKIIKDKDFLDNEENEDILEDIVLTLTLFEDREMIEERLKTY
AHLFDDKVMKQLKRRRYTGWGRLSRKLINGIRDKQSGKTILDFLKSDGFA
NRNFMQLIHDDSLTFKEDIQKAQVSGQGDSLHEHIANLAGSPAIKKGILQ
TVKVVDELVKVMGRHKPENIVIEMARENQTTQKGQKNSRERMKRIEEGIK
ELGSQILKEHPVENTQLQNEKLYLYYLQNGRDMYVDQELDINRLSDYDVD
HIVPQSFLKDDSIDNKVLTRSDKNRGKSDNVPSEEVVKKMKNYWRQLLNA
KLITQRKFDNLTKAERGGLSELDKAGFIKRQLVETRQITKHVAQILDSRM
NTKYDENDKLIREVKVITLKSKLVSDFRKDFQFYKVREINNYHHAHDAYL
NAVVGTALIKKYPKLESEFVYGDYKVYDVRKMIAKSEQEGADKRTADGSE
FESPKKKRKV*,

wherein the bold sequence indicates sequence derived from Cas9, the italics sequence denotes a linker sequence, and the underlined sequence denotes a bipartite nuclear localization sequence, and at least one base editor domain comprising an adenosine deaminase variant comprising an alteration at an amino acid position selected from the group consisting of 21, 23, 25, 38, 51, 54, 70, 71, 72, 73, 94, 124, 133, 138, 139, 146, and 158 of SEQ ID NO: 1. In an embodiment, the adenosine deaminase variant comprises an alteration selected from the group consisting of R21N, R23H, E25F, N38G, L51W, P54C, M70V, Q71M, N72K, Y73S, M94V, P124W, T133K, D138M, D139L, D139M, C146R, and A158K of SEQ ID NO: 1. In another embodiment, the adenosine deaminase variant comprises an alteration V82T of SEQ ID NO: 1. In an embodiment, the adenosine deaminase variant comprises two or more of said alterations. In an embodiment, the adenosine deaminase variant comprises three of more of said alterations. In an embodiment, the adenosine deaminase variant further comprises an alteration selected from the group consisting of Y147T, Y147R, Q154S, Y123H, V82S, T166R, and Q154R. In an embodiment, the adenosine deaminase variant comprises two or more of the following alterations: Y147T, Y147R, Q154S, Y123H, and Q154R.

[0016] In an embodiment of any of the above-delineated fusion proteins and embodiments thereof, the adenosine deaminase variant comprises any one of the following groups of alterations:

### E25F+V82S+Y123H;

### T133K+Y147R+Q154R;

### E25F+V82S+Y123H+Y147R+Q154R;

### L51W+V82S+Y123H+C146R+Y147R+Q154R;

### Y73S+V82S+Y123H+Y147R+Q154R;

### P54C+V82S+Y123H+Y147R+Q154R;

### N38G+V82T+Y123H+Y147R+Q154R;

### N72K+V82S+Y123H+D139L+Y147R+Q154R;

### E25F+V82S+Y123H+D139M+Y147R+Q154R;

### Q71M+V82S+Y123H+Y147R+Q154R;

### E25F+V82S+Y123H+T133K+Y147R+Q154R;

### E25F+V82S+Y123H+Y147R+Q154R;

### V82S+Y123H+P124W+Y147R+Q154R;

### L51W+V82S+Y123H+C146R+Y147R+Q154R;

### P54C+V82S+Y123H+Y147R+Q154R;

### Y73S+V82S+Y123H+Y147R+Q154R;

### N38G+V82T+Y123H+Y147R+Q154R;

### R23H+V82S+Y123H+Y147R+Q154R;

### R21N+V82S+Y123H+Y147R+Q154R;

### V82S+Y123H+Y147R+Q154R+A158K;

### N72K+V82S+Y123H+D139L+Y147R+Q154R;

### E25F+V82S+Y123H+D139M+Y147R+Q154R;

### M70V+V82S+M94V+Y123H+Y147R+Q154R;

### Q71M+V82S+Y123H+Y147R+Q154R;

### E25F+I76Y+V82S+Y123H+Y147R+Q154R;

### I76Y+V82T+Y123H+Y147R+Q154R;

### N38G+I76Y+V82S+Y123H+Y147R+Q154R;

### R23H+I76Y+V82S+Y123H+Y147R+Q154R;

### P54C+I76Y+V82S+Y123H+Y147R+Q154R;

### R21N+I76Y+V82S+Y123H+Y147R+Q154R;

### I76Y+V82S+Y123H+D139M+Y147R+Q154R;

### Y73S+I76Y+V82S+Y123H+Y147R+Q154R;

### E25F+I76Y+V82S+Y123H+Y147R+Q154R;

### I76Y+V82T+Y123H+Y147R+Q154R;

### N38G+I76Y+V82S+Y123H+Y147R+Q154R;

### R23H+I76Y+V82S+Y123H+Y147R+Q154R;

### P54C+I76Y+V82S+Y123H+Y147R+Q154R;

### R21N+I76Y+V82S+Y123H+Y147R+Q154R;

### I76Y+V82S+Y123H+D139M+Y147R+Q154R;

### Y73S+I76Y+V82S+Y123H+Y147R+Q154R;

### V82S+Q154R;

### N72K+V82S+Y123H+Y147R+Q154R;

### Q71M+V82S+Y123H+Y147R+Q154R;

### V82S+Y123H+T133K+Y147R+Q154R;

### V82S+Y123H+T133K+Y147R+Q154R+A158K;

### M70V+Q71M+N72K+V82S+Y123H+Y147R+Q154R;

### N72K+V82S+Y123H+Y147R+Q154R;

### Q71M+V82S+Y123H+Y147R+Q154R;

### M70V+V82S+M94V+Y123H+Y147R+Q154R;

### V82S+Y123H+T133K+Y147R+Q154R;

### V82S+Y123H+T133K+Y147R+Q154R+A158K;

### M70V+Q71M+N72K+V82S+Y123H+Y147R+Q154R.

[0017] In an embodiment, the adenosine deaminase variant comprises any other alteration or group of alterations as described in Table 14 or 18, or in FIGS. 3A-3C.

[0018] In an embodiment of the fusion proteins of any of the above-delineated aspects and embodiments thereof, the polynucleotide programmable DNA binding domain is a Staphylococcus aureus Cas9 (SaCas9), Streptococcus thermophilus 1 Cas9 (St1Cas9), a Streptococcus pyogenes Cas9 (SpCas9), or variants thereof.

[0019] In an embodiment of the fusion proteins of any of the above-delineated aspects and embodiments thereof, the polynucleotide programmable DNA binding domain comprises a modified SaCas9 having an altered protospacer-adjacent motif (PAM) specificity. In an embodiment, the modified SaCas9 comprises amino acid substitutions E782K, N968K, and R1015H, or corresponding amino acid substitutions thereof.

[0020] In an embodiment of the fusion proteins of any of the above-delineated aspects and embodiments thereof, the polynucleotide programmable DNA binding domain comprises a variant of SpCas9 having an altered protospacer-adjacent motif (PAM) specificity. In an embodiment, the altered PAM has specificity for the nucleic acid sequence 5′-NGA-3′, 5′-NGC-3′, 5′-NGG-3′, 5′-NGT-3′, or 5″-NGN-3′. In an embodiment, the variant SpCas9 comprises amino acid substitutions selected from: D1135M, S1136Q, G1218K, E1219F, A1322R, D1332A, R1335E, and T1337R, or corresponding amino acid substitutions thereof; I322V, S409I, E427G, R654L, R753G (MQKFRAER) or corresponding amino acid substitutions thereof; I322V, 54091, E427G, R654L, R753G, R1114G, or corresponding amino acid substitutions thereof, or amino acid substitutions as set forth in FIGS. 3A-3C.

[0021] In an embodiment of the fusion proteins of any of the above-delineated aspects and embodiments thereof, the polynucleotide programmable DNA binding domain is a nuclease inactive or nickase variant. In an embodiment, the nickase variant comprises an amino acid substitution D10A or a corresponding amino acid substitution thereof.

[0022] In an embodiment of the fusion proteins of any of the above-delineated aspects and embodiments thereof, the adenosine deaminase domain is capable of deaminating adenine in deoxyribonucleic acid (DNA).

[0023] In an embodiment of the fusion proteins of any of the above-delineated aspects and embodiments thereof, the adenosine deaminase is a modified adenosine deaminase that does not occur in nature.

[0024] In an embodiment of the adenosine deaminase of the above-delineated aspect and embodiments thereof, the adenosine deaminase is a TadA deaminase. In an embodiment of the fusion proteins of any of the above-delineated aspects and embodiments thereof, the adenosine deaminase is a TadA deaminase. In an embodiment, the TadA deaminase is a TadA*7.10 variant.

[0025] In an embodiment of the fusion proteins of any of the above-delineated aspects and embodiments thereof, the fusion protein comprises a linker between the polynucleotide programmable DNA binding domain and the adenosine deaminase domain. In an embodiment, the linker comprises the amino acid sequence:

SGGSSGGSSGSETPGTSESATPES

[0026] In an embodiment of the fusion proteins of any of the above-delineated aspects and embodiments thereof, the fusion proteins comprises one or more nuclear localization signals. In an embodiment, the nuclear localization signal is a bipartite nuclear localization signal.

[0027] In an embodiment of the fusion proteins of any of the above-delineated aspects and embodiments thereof, the Cas9 is a StCas9.

[0028] In an embodiment of the fusion proteins of any of the above-delineated aspects and embodiments thereof, the Cas9 is a SaCas9 or an SpCas9.

[0029] In an embodiment of the fusion proteins of any of the above-delineated aspects and embodiments thereof, the Cas9 is a modified SaCas9 or a modified SpCas9. In an embodiment, the modified SaCas9 comprises amino acid substitutions E782K, N968K, and R1015H, or corresponding amino acid substitutions thereof. In an embodiment, the modified SaCas9 comprises the amino acid sequence:

KRNYILGLAIGITSVGYGIIDYETRDVIDAGVRLFKEANVENNEGRRSKR
GARRLKRRRRHRIQRVKKLLFDYNLLTDHSELSGINPYEARVKGLSQKLS
EEEFSAALLHLAKRRGVHNVNEVEEDTGNELSTKEQISRNSKALEEKYVA
ELQLERLKKDGEVRGSINRFKTSDYVKEAKQLLKVQKAYHQLDQSFIDTY
IDLLETRRTYYEGPGEGSPFGWKDIKEWYEMLMGHCTYFPEELRSVKYAY
NADLYNALNDLNNLVITRDENEKLEYYEKFQIIENVFKQKKKPTLKQIAK
EILVNEEDIKGYRVTSTGKPEFTNLKVYHDIKDITARKEIIENAELLDQI
AKILTIYQSSEDIQEELTNLNSELTQEEIEQISNLKGYTGTHNLSLKAIN
LILDELWHTNDNQIAIFNRLKLVPKKVDLSQQKEIPTTLVDDFILSPVVK
RSFIQSIKVINAIIKKYGLPNDIIIELAREKNSKDAQKMINEMQKRNRQT
NERIEEIIRTTGKENAKYLIEKIKLHDMQEGKCLYSLEAIPLEDLLNNPF
NYEVDHIIPRSVSFDNSFNNKVLVKQEENSKKGNRTPFQYLSSSDSKISY
ETFKKHILNLAKGKGRISKTKKEYLLEERDINRFSVQKDFINRNLVDTRY
ATRGLMNLLRSYFRVNNLDVKVKSINGGFTSFLRRKWKFKKERNKGYKHH
AEDALIIANADFIFKEWKKLDKAKKVMENQMFEEKQAESMPEIETEQEYK
EIFITPHQIKHIKDFKDYKYSHRVDKKPNRKLINDTLYSTRKDDKGNTLI
VNNLNGLYDKDNDKLKKLINKSPEKLLMYHHDPQTYQKLKLIMEQYGDEK
NPLYKYYEETGNYLTKYSKKDNGPVIKKIKYYGNKLNAHLDITDDYPNSR
NKVVKLSLKPYRFDVYLDNGVYKFVTVKNLDVIKKENYYEVNSKCYEEAK
KLKKISNQAEFIASFYKNDLIKINGELYRVIGVNNDLLNRIEVNMIDITY
REYLENMNDKRPPHIIKTIASKTQSIKKYSTDILGNLYEVKSKKHPQIIK
KG.

[0030] In another aspect, a polynucleotide encoding the fusion protein of any one of the above-delineated aspects and embodiments thereof is provided.

[0031] In another aspect, a cell is provided, in which the cell is produced by introducing into the cell, or a progenitor thereof: a polynucleotide encoding the fusion protein of any one of the above-delineated aspects and embodiments thereof, and one or more guide polynucleotides that target the base editor to effect an A•T to G•C alteration of a SNP associated with a genetic disease. In an embodiment, the cell is a human cell. In an embodiment, the cell is in vitro or in vivo. In an embodiment, the genetic disease is alpha-1 antitrypsin deficiency (A1AD). In an embodiment, the fusion protein and the one or more guide polynucleotides forms a complex in the cell.

[0032] In another aspect, an isolated cell or population of cells propagated or expanded from the cell of the above-delineated aspect and embodiments thereof is provided.

[0033] In an aspect, a method of treating a genetic disease in a subject in need thereof is provided, in which the method comprises administering to the subject the cell, isolated cell, or population of cells of any one of the above-delineated aspects and embodiments thereof. In an embodiment of the method, the cell, isolated cell, or population of cells is autologous, allogeneic, or xenogeneic to the subject.

[0034] In an aspect, a base editor system is provided, in which the base editor system comprises a polynucleotide programmable DNA binding domain and at least one base editor domain that is an adenosine deaminase variant comprising an alteration at an amino acid position selected from the group consisting of 21, 23, 25, 38, 51, 54, 70, 71, 72, 73, 82, 94, 124, 133, 139, 146, and 158 of the following SEQ ID NO: 1, a corresponding alteration in another adenosine deaminase:

```
(SEQ ID NO: 1)
                10 20 30 40
MSEVEFSHEY WMRHALTLAK RARDEREVPV GAVLVLNNRV
                50 60 70 80
IGEGWNRAIG LHDPTAHAEI MALRQGGLVM QNYRLIDATL
                90 100 110 120
YVTFEPCVMC AGAMIHSRIG RVVFGVRNAK TGAAGSLMDV
              130 140 150 160
LHYPGMNHRV EITEGILADE CAALLCYFFR MPRQVFNAQK
KAQSSTD.
```

In an embodiment of the base editor system, the adenosine deaminase variant comprises an alteration selected from the group consisting of R21N, R23H, E25F, N38G, L51W, P54C, M70V, Q71M, N72K, Y73S, V82T, M94V, P124W, T133K, D139L, D139M, C146R, and A158K of SEQ ID NO: 1, or a corresponding alteration in another adenosine deaminase. In an embodiment, the base editor system further comprises one or more guide polynucleotides that target the base editor domain to effect an A•T to G•C alteration of a SNP associated with a genetic disease. In an embodiment, of the base editor system, the adenosine deaminase variant is capable of deaminating adenine in deoxyribonucleic acid (DNA). In an embodiment of the base editor system, the guide polynucleotide comprises ribonucleic acid (RNA), or deoxyribonucleic acid (DNA). In an embodiment of the base editor system, the guide polynucleotide comprises a CRISPR RNA (crRNA) sequence, a trans-activating CRISPR RNA (tracrRNA) sequence, or a combination thereof. In an embodiment, the base editor system further comprises a second guide polynucleotide. In an embodiment, the second guide polynucleotide comprises ribonucleic acid (RNA), or deoxyribonucleic acid (DNA). In an embodiment, the second guide polynucleotide comprises a CRISPR RNA (crRNA) sequence, a trans-activating CRISPR RNA (tracrRNA) sequence, or a combination thereof. In an embodiment of the above-delineated base editor system and embodiments thereof, the polynucleotide-programmable DNA-binding domain comprises a Cas9, Cas12a/Cpf1, Cas12b/C2c1, Cas12c/C2c3, Cas12d/CasY, Cas12e/CasX, Cas12g, Cas12h, Cas12i, or Cas12j/CasΦ domain. In an embodiment, the polynucleotide-programmable DNA-binding domain is nuclease dead. In an embodiment, the polynucleotide-programmable DNA-binding domain is a nickase. In an embodiment, the polynucleotide-programmable DNA-binding domain comprises a Cas9 domain. In an embodiment, the Cas9 domain comprises a nuclease dead Cas9 (dCas9), a Cas9 nickase (nCas9), or a nuclease active Cas9. In an embodiment, the Cas9 domain comprises a Cas9 nickase. In an embodiment, the polynucleotide-programmable DNA-binding domain is an engineered or a modified polynucleotide-programmable DNA-binding domain. In an embodiment of the above-delineated base editor system and embodiments thereof, the genetic disease is alpha-1 antitrypsin deficiency (A1AD).

[0035] In another aspect, a method for correcting a single nucleotide polymorphism (SNP) in a polynucleotide is provided, in which the method comprises: contacting a target nucleotide sequence, at least a portion of which is located in the polynucleotide or its reverse complement, with a fusion protein of any one of the above-delineated aspects and embodiments thereof, or the base editor system of any one of the above-delineated aspects and embodiments thereof; and editing the SNP by deaminating the SNP or its complement nucleobase upon targeting of the base editor to the target nucleotide sequence, wherein deaminating the SNP or its complement nucleobase corrects the SNP. In an embodiment, the SNP is associated with alpha-1 antitrypsin deficiency (A1AD). In an embodiment, the SNP is in the SERPINA1 gene and the correction comprises an E342K (PiZ allele) alteration.

[0036] In an aspect, a method for editing a polynucleotide is provided, in which the method comprises contacting a target nucleotide sequence with the fusion protein of any one of the above-delineated aspects and embodiments thereof, or the base editor system of any one of the above-delineated aspects and embodiments thereof, thereby editing the polynucleotide. In an embodiment of the method, the editing results in less than 20% indel formation, less than 15% indel formation, less than 10% indel formation; less than 5% indel formation; less than 4% indel formation; less than 3% indel formation; less than 2% indel formation; less than 1% indel formation; less than 0.5% indel formation; or less than 0.1% indel formation. In an embodiment of the method, the editing does not result in translocations.

[0037] In another aspect is provided a base editor comprising an ABE9 (TadA*9 deaminase variant) comprising a TadA*7.10 adenosine deaminase variant domain and a Cas9 endonuclease domain selected from the following:

[0038] monoTadA*7.10 having mutations I76Y+V82T+Y147T+Q154S+A109S of SEQ ID NO: 1, and spCas9 having mutations I322V, S409I, E427G, R654L, R753G (MQKFRAER);

[0039] monoTadA*7.10 having mutations I76Y+V82T+Y147T+Q154S+T111R of SEQ ID NO: 1, and spCas9 having mutations I322V, S409I, E427G, R654L, R753G (MQKFRAER);

[0040] monoTadA*7.10 having mutations I76Y+V82T+Y147T+Q154S+D119N of SEQ ID NO: 1, and spCas9 having mutations I322V, S409I, E427G, R654L, R753G (MQKFRAER);

[0041] monoTadA*7.10 having mutations I76Y+V82T+Y147T+Q154S+H122N of SEQ ID NO: 1, and spCas9 having mutations I322V, S409I, E427G, R654L, R753G (MQKFRAER);

[0042] monoTadA*7.10 having mutations I76Y+V82T+Y147d+Q154S of SEQ ID NO: 1, and spCas9 having mutations I322V, S409I, E427G, R654L, R753G (MQKFRAER);

[0043] monoTadA*7.10 having mutations I76Y+V82T+Y147T+Q154S+F149Y of SEQ ID NO: 1, and spCas9 having mutations I322V, S409I, E427G, R654L, R753G (MQKFRAER);

[0044] monoTadA*7.10 having mutations I76Y+V82T+Y147T+Q154S+T166I of SEQ ID NO: 1, and spCas9 having mutations I322V, S409I, E427G, R654L, R753G (MQKFRAER); and

[0045] monoTadA*7.10 having mutations I76Y+V82T+Y147T+Q154S+D167N of SEQ ID NO: 1, and spCas9 having mutations I322V, S409I, E427G, R654L, R753G (MQKFRAER).

[0046] mono TadA*7.10 having mutations I76Y+V82T+Y147T+Q154S+L36H+N157K of SEQ ID NO: 1, and spCas9 having mutations I322V, S409I, E427G, R654L, R753G, R1114G (MQKFRAER);

[0047] mono TadA*7.10 having mutations I76Y+V82T+Y147D+Q154S+F149Y+D167N+L36H+N157K of SEQ ID NO: 1, and SpCas9 having mutations I322V, S409I, E427G, R654L, R753G, R1114G (MQKFRAER);

[0048] monoTadA*7.10 having mutations I76Y+V82T+Y147D+Q154S+F149Y+D167N+L36H+N157K+V106W of SEQ ID NO: 1, and SpCas9 having mutations I322V, S409I, E427G, R654L, R753G, R1114G (MQKFRAER);

[0049] mono TadA*7.10 having mutations A109S+T111R+D119N+H122N+Y147D+F149Y+T166I+D167N of SEQ ID NO: 1, and SpCas9 having mutations I322V, S409I, E427G, R654L, R753G, R1114G, MQKFRAER; and

[0050] mono TadA*7.10 having mutations A109S+T111R+D119N+H122N+Y147D+F149Y+T166I+D167N+V106W of SEQ ID NO: 1, and SpCas9 having mutations I322V, S409I, E427G, R654L, R753G, R1114G (MQKFRAER); and one or more guide polynucleotides that target the adenosine deaminase variant domain to effect an A•T to G•C alteration of a SNP associated with a genetic disease. In an embodiment of the base editor, the SNP is associated with alpha-1 antitrypsin deficiency (A1AD).

[0051] In another aspect, a vector is provided in which the vector comprises one or more polynucleotides encoding an ABE9 base editor comprising a TadA adenosine deaminase domain and an SpCas9 endonuclease domain selected from

[0052] monoTadA*7.10 having mutations I76Y+V82T+Y147T+Q154S+A109S and spCas9 having mutations I322V, S409I, E427G, R654L, R753G (MQKFRAER);

[0053] monoTadA*7.10 having mutations I76Y+V82T+Y147T+Q154S+T111R and spCas9 having mutations I322V, S409I, E427G, R654L, R753G (MQKFRAER);

[0054] monoTadA*7.10 having mutations I76Y+V82T+Y147T+Q154S+D119N and spCas9 having mutations I322V, S409I, E427G, R654L, R753G (MQKFRAER);

[0055] monoTadA*7.10 having mutations I76Y+V82T+Y147T+Q154S+H122N and spCas9 having mutations I322V, S409I, E427G, R654L, R753G (MQKFRAER);

[0056] monoTadA*7.10 having mutations I76Y+V82T+Y147d+Q154S and spCas9 having mutations I322V, S409I, E427G, R654L, R753G (MQKFRAER);

[0057] monoTadA*7.10 having mutations I76Y+V82T+Y147T+Q154S+F149Y and spCas9 having mutations I322V, S409I, E427G, R654L, R753G (MQKFRAER);

[0058] monoTadA*7.10 having mutations I76Y+V82T+Y147T+Q154S+T166I and spCas9 having mutations I322V, S409I, E427G, R654L, R753G (MQKFRAER); and

[0059] monoTadA*7.10 having mutations I76Y+V82T+Y147T+Q154S+D167N and spCas9 having mutations I322V, S409I, E427G, R654L, R753G (MQKFRAER).

[0060] mono TadA*7.10 having mutations I76Y+V82T+Y147T+Q154S+L36H+N157K and spCas9 having mutations I322V, S409I, E427G, R654L, R753G, R1114G (MQKFRAER);

[0061] mono TadA*7.10 having mutations I76Y+V82T+Y147D+Q154S+F149Y+D167N+L36H+N157K and SpCas9 having mutations I322V, S409I, E427G, R654L, R753G, R1114G (MQKFRAER);

[0062] monoTadA*7.10 having mutations I76Y+V82T+Y147D+Q154S+F149Y+D167N+L36H+N157K+V106W and SpCas9 having mutations I322V, S409I, E427G, R654L, R753G, R1114G, (MQKFRAER)

[0063] mono TadA*7.10 having mutations A109S+T111R+D119N+H122N+Y147D+F149Y+T166I+D167N and SpCas9 having mutations I322V, 54091, E427G, R654L, R753G, R1114G (MQKFRAER); and

[0064] mono TadA*7.10 having mutations A109S+T111R+D119N+H122N+Y147D+F149Y+T166I+D167N+V106W and SpCas9 having mutations I322V, 54091, E427G, R654L, R753G, R1114G (MQKFRAER). In an embodiment, the vector is a plasmid, viral, or mRNA vector.

[0065] In another aspect, a composition is provided, in which the composition comprises the fusion protein of any one of the above-delineated aspects and embodiments thereof or the base editor system of any one of the above-delineated aspects and embodiments thereof. In an embodiment, the composition further comprises a pharmaceutically acceptable excipient, diluent, or carrier.

[0066] In another aspect, a composition comprising the fusion protein of any one of the above-delineated aspects and embodiments thereof bound to a guide RNA is provided, wherein the guide RNA comprises a nucleic acid sequence that is complementary to an SERPINA1 gene associated with alpha-1 antitrypsin deficiency (A1AD).

[0067] In another aspect, a composition comprising the base editor system of any one of the above-delineated aspects and embodiments thereof bound to a guide RNA is provided, wherein the guide RNA comprises a nucleic acid sequence that is complementary to an SERPINA1 gene associated with alpha-1 antitrypsin deficiency (A1AD).

[0068] In an embodiment of the compositions of any one of the above-delineated aspects and embodiments thereof, the adenosine deaminase variant is capable of deaminating adenine in deoxyribonucleic acid (DNA).

[0069] In an embodiment of the compositions of any one of the above-delineated aspects and embodiments thereof, the fusion protein or base editor system

[0070] (i) comprises a Cas9 nickase;

[0071] (ii) comprises a nuclease inactive Cas9;

[0072] (iii) comprises an SpCas9 variant comprising a combination of amino acid substitutions shown in FIGS. 3A-3C; or

[0073] (iv) comprises an SpCas9 variant comprising a combination of amino acid sequence substitutions selected from I322V, S409I, E427G, R654L, R753G (MQKFRAER); or I322V, S409I, E427G, R654L, R753G, R1114G, (MQKFRAER).

[0074] In an embodiment of the compositions of any one of the above-delineated aspects and embodiments thereof, the composition further comprises a pharmaceutically acceptable excipient, diluent, or carrier, i.e., a pharmaceutical composition.

[0075] In an aspect, a pharmaceutical composition for the treatment of a disease or disorder comprising the composition further comprising a pharmaceutically acceptable excipient, diluent, or carrier is provided. In an embodiment of the pharmaceutical composition, the disease or disorder is alpha-1 antitrypsin deficiency (A1AD). In an embodiment of the pharmaceutical composition, the fusion protein or the base editor system is bound to a guide RNA, wherein the guide RNA comprises a nucleic acid sequence that is complementary to an SERPINA1 gene associated with alpha-1 antitrypsin deficiency (A1AD). In an embodiment of the pharmaceutical composition, the gRNA and the base editor are formulated together or separately. In an embodiment of the above-delineated pharmaceutical composition and embodiments thereof, the gRNA comprises a nucleic acid sequence, from 5′ to 3′, or a 1, 2, 3, 4, or 5 nucleotide 5′ truncation fragment thereof, selected from one or more of

[0076] 5′-ACCAUCGACAAGAAAGGGACUGA GUUUUAGAGC UAGAAAUAGC AAGUUAAAAU AAGGCUAGUC CGUUAUCAAC UUGAAAAAGU GGCACCGAGU CGGUGCUUUU-3′;

[0077] 5′-CCAUCGACAAGAAAGGGACUGA GUUUUAGAGC UAGAAAUAGC AAGUUAAAAU AAGGCUAGUC CGUUAUCAAC UUGAAAAAGU GGCACCGAGU CGGUGCUUUU-3′;

[0078] 5′-CAUCGACAAGAAAGGGACUGA GUUUUAGAGC UAGAAAUAGC AAGUUAAAAU AAGGCUAGUC CGUUAUCAAC UUGAAAAAGU GGCACCGAGU CGGUGCUUUU-3′;

[0079] 5′-AUCGACAAGAAAGGGACUGA GUUUUAGAGC UAGAAAUAGC AAGUUAAAAU AAGGCUAGUC CGUUAUCAAC UUGAAAAAGU GGCACCGAGU CGGUGCUUUU-3′;

[0080] 5′-UCGACAAGAAAGGGACUGA GUUUUAGAGC UAGAAAUAGC AAGUUAAAAU AAGGCUAGUC CGUUAUCAAC UUGAAAAAGU GGCACCGAGU CGGUGCUUUU-3′; or

[0081] 5′-CGACAAGAAAGGGACUGA GUUUUAGAGC UAGAAAUAGC AAGUUAAAAU AAGGCUAGUC CGUUAUCAAC UUGAAAAAGU GGCACCGAGU CGGUGCUUUU-3′. In an embodiment of the above-delineated pharmaceutical composition and embodiments thereof, the pharmaceutical composition further comprises a vector suitable for expression in a mammalian cell, wherein the vector comprises a polynucleotide encoding the base editor. In an embodiment of the pharmaceutical composition, the polynucleotide encoding the base editor is mRNA. In an embodiment of the pharmaceutical composition, the vector is a viral vector. In an embodiment of the pharmaceutical composition, the viral vector is a retroviral vector, adenoviral vector, lentiviral vector, herpesvirus vector, or adeno-associated viral vector (AAV). In an embodiment of the pharmaceutical composition of any one of the above-delineated aspects and embodiments thereof, the pharmaceutical composition further comprises a ribonucleoparticle suitable for expression in a mammalian cell. In an embodiment of the pharmaceutical composition of any one of the above-delineated aspects and embodiments thereof, the pharmaceutical composition further comprises a lipid.

[0082] In another aspect, a method of treating alpha-1 antitrypsin deficiency (A1AD) is provided, in which the method comprises administering to a subject in need thereof the pharmaceutical composition of any one of the above-delineated aspects and embodiments thereof.

[0083] In another aspect, use of the pharmaceutical composition of any one of the above-delineated aspects and embodiments thereof in the treatment of alpha-1 antitrypsin deficiency (A1AD) in a subject is provided.

[0084] In an embodiment of the above-delineated method or use, the subject is a human.

[0085] In an embodiment of the fusion protein or base editor system of any one of the above-delineated aspects and embodiments thereof, the adenosine deaminase variant comprises any one of the following groups of alterations:

### E25F+V82S+Y123H;

### T133K+Y147R+Q154R;

### E25F+V82S+Y123H+Y147R+Q154R;

### L51W+V82S+Y123H+C146R+Y147R+Q154R;

### Y73S+V82S+Y123H+Y147R+Q154R;

### P54C+V82S+Y123H+Y147R+Q154R;

### N38G+V82T+Y123H+Y147R+Q154R;

### N72K+V82S+Y123H+D139L+Y147R+Q154R;

### E25F+V82S+Y123H+D139M+Y147R+Q154R;

### Q71M+V82S+Y123H+Y147R+Q154R;

### E25F+V82S+Y123H+T133K+Y147R+Q154R;

### E25F+V82S+Y123H+Y147R+Q154R;

### V82S+Y123H+P124W+Y147R+Q154R;

### L51W+V82S+Y123H+C146R+Y147R+Q154R;

### P54C+V82S+Y123H+Y147R+Q154R;

### Y73S+V82S+Y123H+Y147R+Q154R;

### N38G+V82T+Y123H+Y147R+Q154R;

### R23H+V82S+Y123H+Y147R+Q154R;

### R21N+V82S+Y123H+Y147R+Q154R;

### V82S+Y123H+Y147R+Q154R+A158K;

### N72K+V82S+Y123H+D139L+Y147R+Q154R;

### E25F+V82S+Y123H+D139M+Y147R+Q154R;

### M70V+V82S+M94V+Y123H+Y147R+Q154R;

### Q71M+V82S+Y123H+Y147R+Q154R;

### E25F+I76Y+V82S+Y123H+Y147R+Q154R;

### I76Y+V82T+Y123H+Y147R+Q154R;

### N38G+I76Y+V82S+Y123H+Y147R+Q154R;

### R23H+I76Y+V82S+Y123H+Y147R+Q154R;

### P54C+I76Y+V82S+Y123H+Y147R+Q154R;

### R21N+I76Y+V82S+Y123H+Y147R+Q154R;

### I76Y+V82S+Y123H+D139M+Y147R+Q154R;

### Y73S+I76Y+V82S+Y123H+Y147R+Q154R;

### E25F+I76Y+V82S+Y123H+Y147R+Q154R;

### I76Y+V82T+Y123H+Y147R+Q154R;

### N38G+I76Y+V82S+Y123H+Y147R+Q154R;

### R23H+I76Y+V82S+Y123H+Y147R+Q154R;

### P54C+I76Y+V82S+Y123H+Y147R+Q154R;

### R21N+I76Y+V82S+Y123H+Y147R+Q154R;

### I76Y+V82S+Y123H+D139M+Y147R+Q154R;

### Y73S+I76Y+V82S+Y123H+Y147R+Q154R;

### V82S+Q154R;

### N72K+V82S+Y123H+Y147R+Q154R;

### Q71M+V82S+Y123H+Y147R+Q154R;

### V82S+Y123H+T133K+Y147R+Q154R;

### V82S+Y123H+T133K+Y147R+Q154R+A158K;

### M70V+Q71M+N72K+V82S+Y123H+Y147R+Q154R;

### N72K+V82S+Y123H+Y147R+Q154R;

### Q71M+V82S+Y123H+Y147R+Q154R;

### M70V+V82S+M94V+Y123H+Y147R+Q154R;

### V82S+Y123H+T133K+Y147R+Q154R;

### V82S+Y123H+T133K+Y147R+Q154R+A158K;

### M70V+Q71M+N72K+V82S+Y123H+Y147R+Q154R.

[0086] In an embodiment, the adenosine deaminase variant, e.g., TadA*9 deaminase variant) comprises any alteration or group of alterations as described in Table 14 or 18.

[0087] As would be appreciated by the skilled practitioner in the art in connection with the adenosine deaminases of the above-delineated aspects and embodiments thereof, amino acid alterations in other adenosine deaminases, which correspond to the amino acid alterations set forth in SEQ ID NO: 1, may be readily determined by performing routine sequence alignments and assessing relatedness and/or identities of the amino acid sequence of SEQ ID NO: 1 and the sequences, or relevant portions thereof, of other adenosine deaminase(s), such as TadA deaminases and the like, as described supra. In an embodiment, the amino acid sequence of another adenosine deaminase comprises at least 85% sequence identity to SEQ ID NO:1. In an embodiment, the amino acid sequence of another adenosine deaminase comprises at least 90% sequence identity to SEQ ID NO:1. In an embodiment, the amino acid sequence of another adenosine deaminase comprises at least 95% sequence identity to SEQ ID NO:1. In an embodiment, the amino acid sequence of another adenosine deaminase comprises at least 98% sequence identity to SEQ ID NO:1. In an embodiment, the amino acid sequence of another adenosine deaminase comprises at least 99% sequence identity to SEQ ID NO:1.

[0088] In another aspect is provided the above-delineated adenosine deaminase, fusion protein, base editor, or base editor system and embodiments thereof, comprising the adenosine deaminase or adenosine deaminase variant, which is a TadA*7.10 variant comprising any one of the following amino acid alterations or groups of alterations: V82T; I76Y+V82T; or I76Y+V82T+Y147T+Q154S.

[0089] In another aspect is provided an adenosine deaminase variant which is a TadA*7.10 variant comprising any one of the following amino acid alterations or groups of alterations: V82T; I76Y+V82T; or I76Y+V82T+Y147T+Q154S.

[0090] In another aspect, a fusion protein is provided, in which the fusion protein comprises a polynucleotide programmable DNA binding domain and at least one base editor domain that is an TadA*7.10 adenosine deaminase variant comprising any one of the following amino acid alterations or groups of alterations: V82T; I76Y+V82T; or I76Y+V82T+Y147T+Q154S. In an embodiment of the fusion protein, the polynucleotide programmable DNA binding domain comprises a Cas9 endonuclease domain. In an embodiment of the fusion protein, the Cas9 endonuclease domain comprises spCas9 having mutations I322V, 54091, E427G, R654L, R753G (MQKFRAER).

[0091] In an embodiment of the above-delineated adenosine deaminase variant and embodiments thereof, or the above-delineated fusion protein and embodiments thereof, the TadA7*10 is monomeric.

[0092] In another aspect, a nucleobase editor is provided in which the nucleobase editor comprises a TadA*7.10 adenosine deaminase variant domain and a Cas9 endonuclease domain selected from the following:

[0093] monoTadA*7.10 having mutation V82T and spCas9 having mutations I322V, 54091, E427G, R654L, R753G (MQKFRAER);

[0094] monoTadA*7.10 having mutations I76Y+V82T and spCas9 having mutations I322V, S409I, E427G, R654L, R753G (MQKFRAER); or

monoTadA*7.10 having mutations I76Y+V82T+Y147T+Q154S and spCas9 having mutations I322V, S409I, E427G, R654L, R753G (MQKFRAER).

### Definitions

[0095] The following definitions supplement those in the art and are directed to the current application and are not to be imputed to any related or unrelated case, e.g., to any commonly owned patent or application. Although any methods and materials similar or equivalent to those described herein can be used in the practice for testing of the present disclosure, the preferred materials and methods are described herein. Accordingly, the terminology used herein is for the purpose of describing particular embodiments only, and is not intended to be limiting.

[0096] Unless defined otherwise, all technical and scientific terms used herein have the meaning commonly understood by a person skilled in the art to which this invention belongs. The following references provide one of skill with a general definition of many of the terms used in this invention: Singleton et al., Dictionary of Microbiology and Molecular Biology (2nd ed. 1994); The Cambridge Dictionary of Science and Technology (Walker ed., 1988); The Glossary of Genetics, 5th Ed., R. Rieger et al. (eds.), Springer Verlag (1991); and Hale & Marham, The Harper Collins Dictionary of Biology (1991). As used herein, the following terms have the meanings ascribed to them below, unless specified otherwise.

[0097] In this application, the use of the singular includes the plural unless specifically stated otherwise. It must be noted that, as used in the specification, the singular forms “a,” “an” and “the” include plural referents unless the context clearly dictates otherwise. In this application, the use of “or” means “and/or” unless stated otherwise. Furthermore, use of the term “including” as well as other forms, such as “include”, “includes,” and “included,” is not limiting.

[0098] As used in this specification and claim(s), the words “comprising” (and any form of comprising, such as “comprise” and “comprises”), “having” (and any form of having, such as “have” and “has”), “including” (and any form of including, such as “includes” and “include”) or “containing” (and any form of containing, such as “contains” and “contain”) are inclusive or open-ended and do not exclude additional, unrecited elements or method steps. It is contemplated that any embodiment discussed in this specification can be implemented with respect to any method or composition of the present disclosure, and vice versa. Furthermore, compositions of the present disclosure can be used to achieve methods of the present disclosure.

[0099] The term “about” or “approximately” means within an acceptable error range for the particular value as determined by one of ordinary skill in the art, which will depend in part on how the value is measured or determined, i.e., the limitations of the measurement system. For example, “about” can mean within 1 or more than 1 standard deviation, per the practice in the art. Alternatively, “about” can mean a range of up to 20%, up to 10%, up to 5%, or up to 1% of a given value. Alternatively, particularly with respect to biological systems or processes, the term can mean within an order of magnitude, e.g., within 5-fold, within 2-fold of a value. Where particular values are described in the application and claims, unless otherwise stated, the term “about” means within an acceptable error range for the particular value should be assumed.

[0100] Reference in the specification to “some embodiments,” “an embodiment,” “one embodiment” or “other embodiments” means that a particular feature, structure, or characteristic described in connection with the embodiments is included in at least some embodiments, but not necessarily all embodiments, of the present disclosures.

[0101] By “adenosine deaminase” is meant a polypeptide or fragment thereof capable of catalyzing the hydrolytic deamination of adenine or adenosine. In some embodiments, the deaminase or deaminase domain is an adenosine deaminase catalyzing the hydrolytic deamination of adenosine to inosine or deoxy adenosine to deoxyinosine. In some embodiments, the adenosine deaminase catalyzes the hydrolytic deamination of adenine or adenosine in deoxyribonucleic acid (DNA). The adenosine deaminases (e.g., engineered adenosine deaminases, evolved adenosine deaminases) provided herein may be from any organism, such as a bacterium.

[0102] In some embodiments, the deaminase or deaminase domain is a variant of a naturally-occurring deaminase from an organism, such as a human, chimpanzee, gorilla, monkey, cow, dog, rat, or mouse. In some embodiments, the deaminase or deaminase domain does not occur in nature. For example, in some embodiments, the deaminase or deaminase domain is at least 50%, at least 55%, at least 60%, at least 65%, at least 70%, at least 75% at least 80%, at least 85%, at least 90%, at least 95%, at least 96%, at least 97%, at least 98%, at least 99%, or at least 99.5% identical to a naturally-occurring deaminase. In some embodiments, the adenosine deaminase is from a bacterium, such as, E. coli, S. aureus, S. typhi, S. putrefaciens, H. influenzae, or C. crescentus. In some embodiments, the adenosine deaminase is a TadA deaminase. In some embodiments, the TadA deaminase is an E. coli TadA (ecTadA) deaminase or a fragment thereof.

[0103] For example, deaminase domains are described in International PCT Application Nos. PCT/2017/045381 (WO 2018/027078) and PCT/US2016/058344 (WO 2017/070632), each of which is incorporated herein by reference for its entirety. Also, see Komor, A. C., et al., “Programmable editing of a target base in genomic DNA without double-stranded DNA cleavage” Nature 533, 420-424 (2016); Gaudelli, N. M., et al., “Programmable base editing of A•T to G•C in genomic DNA without DNA cleavage” Nature 551, 464-471 (2017); Komor, A. C., et al., “Improved base excision repair inhibition and bacteriophage Mu Gam protein yields C:G-to-T:A base editors with higher efficiency and product purity” Science Advances 3:eaao4774 (2017)), and Rees, H. A., et al., “Base editing: precision chemistry on the genome and transcriptome of living cells.” Nat Rev Genet. 2018 December; 19(12):770-788. doi: 10.1038/s41576-018-0059-1, the entire contents of which are hereby incorporated by reference.

[0104] A wild type TadA(wt) adenosine deaminase has the following sequence (also termed TadA reference sequence):

MSEVEFSHEYWMRHALTLAKRAWDEREVPVGAVLVHNNRVIGEGWNRPIG
RHDPTAHAEIMALRQGGLVMQNYRLIDATLYVTLEPCVMCAGAMIHSRIG
RVVFGARDAKTGAAGSLMDVLHHPGMNHRVEITEGILADECAALLSDFFR
MRRQEIKAQKKAQSSTD.

[0105] In some embodiments, the adenosine deaminase comprises an alteration in the following sequence:

MSEVEFSHEYWMRHALTLAKRARDEREVPVGAVLVLNNRVIGEGWNRAIG
LHDPTAHAEIMALRQGGLVMQNYRLIDATLYVTFEPCVMCAGAMIHSRIG
RVVFGVRNAKTGAAGSLMDVLHYPGMNHRVEITEGILADECAALLCYFFR
MPRQVFNAQKKAQSSTD

(also termed TadA*7.10).

[0106] The present invention features novel nucleobase editors, where the alterations are made relative to a TadA*7.10 reference sequence.

[0107] In some embodiments, TadA*7.10 comprises at least one alteration. In some embodiments, TadA*7.10 comprises an alteration at amino acid 82 and/or 166. In particular embodiments, a variant of the above-referenced sequence comprises one or more of the following alterations: Y147T, Y147R, Q154S, Y123H, V82S, T166R, and/or Q154R. The alteration Y123H refers to the alteration H123Y in TadA*7.10 reverted back to Y123H TadA(wt). In other embodiments, a variant of the TadA*7.10 sequence comprises one or more of the following alterations R21N, R23H, E25F, N38G, L51W, P54C, M70V, Q71M, N72K, Y73S, M94V, P124W, T133K, D139L, D139M, C146R, and A158K of SEQ ID NO: 1. In some embodiments, a variant of the TadA*7.10 sequence comprises a combination of alterations selected from the group consisting of Y147T+Q154R; Y147T+Q154S; Y147R+Q154S; V82S+Q154S; V82S+Y147R; V82S+Q154R; V82S+Y123H; I76Y+V82S; V82S+Y123H+Y147T; V82S+Y123H+Y147R; V82S+Y123H+Q154R; Y147R+Q154R+Y123H; Y147R+Q154R+I76Y; Y147R+Q154R+T166R; Y123H+Y147R+Q154R+I76Y; V82S+Y123H+Y147R+Q154R; and I76Y+V82S+Y123H+Y147R+Q154R.

[0108] In other embodiments, the invention provides adenosine deaminase variants that include deletions, e.g., TadA*8, comprising a deletion of the C-terminus beginning at residue 149, 150, 151, 152, 153, 154, 155, 156, or 157, relative to TadA*7.10, the TadA reference sequence, or a corresponding mutation in another TadA.

[0109] In still other embodiments, the adenosine deaminase variant is a homodimer comprising two adenosine deaminase domains each having one or more of the following alterations Y147T, Y147R, Q154S, Y123H, V82S, T166R, and/or Q154R relative to TadA*7.10, the TadA reference sequence, or a corresponding mutation in another TadA. In other embodiments, the adenosine deaminase variant is a homodimer comprising two adenosine deaminase domains (e.g., TadA*8) each having a combination of alterations selected from the group of: Y147T+Q154R; Y147T+Q154S; Y147R+Q154S; V82S+Q154S; V82S+Y147R; V82S+Q154R; V82S+Y123H; I76Y+V82S; V82S+Y123H+Y147T; V82S+Y123H+Y147R; V82S+Y123H+Q154R; Y147R+Q154R+Y123H; Y147R+Q154R+I76Y; Y147R+Q154R+T166R; Y123H+Y147R+Q154R+I76Y; V82S+Y123H+Y147R+Q154R; and I76Y+V82S+Y123H+Y147R+Q154R, relative to TadA*7.10, the TadA reference sequence, or a corresponding mutation in another TadA.

[0110] In other embodiments, the adenosine deaminase variant is a heterodimer comprising a wild-type TadA adenosine deaminase domain and an adenosine deaminase variant domain (e.g., TadA*8) comprising one or more of the following alterations Y147T, Y147R, Q154S, Y123H, V82S, T166R, and/or Q154R, relative to TadA*7.10, the TadA reference sequence, or a corresponding mutation in another TadA. In other embodiments, the adenosine deaminase variant is a heterodimer comprising a wild-type TadA adenosine deaminase domain and an adenosine deaminase variant domain (e.g. TadA*8) comprising a combination of alterations selected from the group of: Y147T+Q154R; Y147T+Q154S; Y147R+Q154S; V82S+Q154S; V82S+Y147R; V82S+Q154R; V82S+Y123H; I76Y+V82S; V82S+Y123H+Y147T; V82S+Y123H+Y147R; V82S+Y123H+Q154R; Y147R+Q154R+Y123H; Y147R+Q154R+I76Y; Y147R+Q154R+T166R; Y123H+Y147R+Q154R+I76Y; V82S+Y123H+Y147R+Q154R; and I76Y+V82S+Y123H+Y147R+Q154R, relative to TadA*7.10, the TadA reference sequence, or a corresponding mutation in another TadA.

[0111] In other embodiments, the adenosine deaminase variant is a heterodimer comprising a TadA*7.10 domain and an adenosine deaminase variant domain (e.g., TadA*8) comprising one or more of the following alterations Y147T, Y147R, Q154S, Y123H, V82S, T166R, and/or Q154R, relative to TadA*7.10, the TadA reference sequence, or a corresponding mutation in another TadA. In other embodiments, the adenosine deaminase variant is a heterodimer comprising a TadA*7.10 domain and an adenosine deaminase variant domain (e.g. TadA*8) comprising a combination of the following alterations: Y147T+Q154R; Y147T+Q154S; Y147R+Q154S; V82S+Q154S; V82S+Y147R; V82S+Q154R; V82S+Y123H; I76Y+V82S; V82S+Y123H+Y147T; V82S+Y123H+Y147R; V82S+Y123H+Q154R; Y147R+Q154R+Y123H; Y147R+Q154R+I76Y; Y147R+Q154R+T166R; Y123H+Y147R+Q154R+I76Y; V82S+Y123H+Y147R+Q154R; or I76Y+V82S+Y123H+Y147R+Q154R, relative to TadA*7.10, the TadA reference sequence, or a corresponding mutation in another TadA. In one embodiment, the adenosine deaminase is a TadA*8 that comprises or consists essentially of the following sequence or a fragment thereof having adenosine deaminase activity:

MSEVEFSHEYWMRHALTLAKRARDEREVPVGAVLVLNNRVIGEGWNRAIG
LHDPTAHAEIMALRQGGLVMQNYRLIDATLYVTFEPCVMCAGAMIHSRIG
RVVFGVRNAKTGAAGSLMDVLHYPGMNHRVEITEGILADECAALLCTFFR
MPRQVFNAQKKAQSSTD.

[0112] In some embodiments, the TadA*8 is truncated. In some embodiments, the truncated TadA*8 is missing 1, 2, 3, 4, 5, 6, 7, 8, 9, 10, 11, 12, 13, 14, 15, 6, 17, 18, 19, or 20 N-terminal amino acid residues relative to the full length TadA*8. In some embodiments, the truncated TadA*8 is missing 1, 2, 3, 4, 5, 6, 7, 8, 9, 10, 11, 12, 13, 14, 15, 6, 17, 18, 19, or 20 C-terminal amino acid residues relative to the full length TadA*8. In some embodiments the adenosine deaminase variant is a full-length TadA*8.

[0113] In particular embodiments, an adenosine deaminase heterodimer comprises an TadA*8 domain and an adenosine deaminase domain selected from one of the following:

Staphylococcus aureus (S. aureus) TadA:
MGSHMTNDIYFMTLAIEEAKKAAQLGEVPIGAIITKDDEVIARAHNLRET
LQQPTAHAEHIAIERAAKVLGSWRLEGCTLYVTLEPCVMCAGTIVMSRIP
RVVYGADDPKGGCSGSLMNLLQQSNFNHRAIVDKGVLKEACSTLLTTFFK
NLRANKKSTN
Bacillus subtilis (B. subtilis) TadA:
MTQDELYMKEAIKEAKKAEEKGEVPIGAVLVINGEIIARAHNLRETEQRS
IAHAEMLVIDEACKALGTWRLEGATLYVTLEPCPMCAGAWLSRVEKVVFG
AFDPKGGCSGTLMNLLQEERFNHQAEVVSGVLEEECGGMLSAFFRELRKK
KKAARKNLSE
Salmonella typhimurium (S. typhimurium) TadA:
MPPAFITGVTSLSDVELDHEYWMRHALTLAKRAWDEREVPVGAVLVHNHR
VIGEGWNRPIGRHDPTAHAEIMALRQGGLVLQNYRLLDTTLYVTLEPCVM
CAGAMVHSRIGRVVFGARDAKTGAAGSLIDVLHHPGMNHRVEIIEGVLRD
ECATLLSDFFRMRRQEIKALKKADRAEGAGPAV
Shewanella putrefaciens (S. putrefaciens) TadA:
MDEYWMQVAMQMAEKAEAAGEVPVGAVLVKDGQQIATGYNLSISQHDPTA
HAEILCLRSAGKKLENYRLLDATLYITLEPCAMCAGAMVHSRIARVVYGA
RDEKTGAAGTVVNLLQHPAFNHQVEVTSGVLAEACSAQLSRFFKRRRDEK
KALKLAQRAQQGIE
Haemophilus influenzae F3031 (H. influenzae) TadA:
MDAAKVRSEFDEKMMRYALELADKAEALGEIPVGAVLVDDARNIIGEGWN
LSIVQSDPTAHAEIIALRNGAKNIQNYRLLNSTLYVTLEPCTMCAGAILH
SRIKRLVFGASDYKTGAIGSRFHFFDDYKMNHTLEITSGVLAEECSQKLS
TFFQKRREEKKIEKALLKSLSDK
Caulobacter crescentus (C. crescentus) TadA:
MRTDESEDQDHRMMRLALDAARAAAEAGETPVGAVILDPSTGEVIATAGN
GPIAAHDPTAHAEIAAMRAAAAKLGNYRLTDLTLVVTLEPCAMCAGAISH
ARIGRVVFGADDPKGGAVVHGPKFFAQPTCHWRPEVTGGVLADESADLLR
GFFRARRKAKI
Geobacter sulfurreducens (G. sulfurreducens) TadA:
MSSLKKTPIRDDAYWMGKAIREAAKAAARDEVPIGAVIVRDGAVIGRGHN
LREGSNDPSAHAEMIAIRQAARRSANWRLTGATLYVTLEPCLMCMGAIIL
ARLERVVFGCYDPKGGAAGSLYDLSADPRLNHQVRLSPGVCQEECGTMLS
DFFRDLRRRKKAKATPALFIDERKVPPEP
TadA*7.10
MSEVEFSHEYWMRHALTLAKRARDEREVPVGAVLVLNNRVIGEGWNRAIG
LHDPTAHAEIMALRQGGLVMQNYRLIDATLYVTFEPCVMCAGAMIHSRIG
RVVFGVRNAKTGAAGSLMDVLHYPGMNHRVEITEGILADECAALLCYFFR
MPRQVFNAQKKAQSSTD.

[0114] By “Adenosine Deaminase Base Editor 8 (ABE8) polynucleotide” is meant a polynucleotide encoding an ABE8.

[0115] By “Adenosine Deaminase Base Editor 9 (ABE9) polypeptide” or “ABE9” is meant a base editor as defined herein comprising an adenosine deaminase variant (TadA*9) comprising one or more alterations at positions sssssss of the sequence shown below. In an embodiment, the adenosine deaminase variant (TadA*9) comprises following alterations: R21N, R23H, E25F, N38G, L51W, P54C, M70V, Q71M, N72K, Y73S, V82T, M94V, P124W, T133K, D139L, D139M, C146R, and A158K, in the following reference sequence:

```
                10 20 30 40
MSEVEFSHEY WMRHALTLAK RARDEREVPV GAVLVLNNRV
                50 60 70 80
IGEGWNRAIG LHDPTAHAEI MALRQGGLVM QNYRLIDATL
                90 100 110 120
YVTFEPCVMC AGAMIHSRIG RVVFGVRNAK TGAAGSLMDV
              130 140 150 160
LHYPGMNHRV EITEGILADE CAALLCYFFR MPRQVFNAQK
KAQSSTD.
```

The relevant bases altered in the reference sequence are shown by underlining and bold font. In some embodiments, ABE9 comprises further alterations, as described herein, relative to the reference sequence.

[0116] By “Adenosine Deaminase Base Editor 9 (ABE9) polynucleotide” is meant a polynucleotide encoding an ABE9.

[0117] By “alpha-1 antitrypsin (A1AT) protein” is meant a polypeptide or fragment thereof having at least about 95% amino acid sequence identity to UniProt Accession No. P01009. In particular embodiments, an A1A•T protein comprises one or more alterations relative to the following reference sequence. In one particular embodiment, an A1A•T protein associated with A1AD comprises an E342K mutation. An exemplary A1A•T amino acid sequence is >sp|P01009|A1A•T HUMAN Alpha-1-antitrypsin OS=Homo sapiens OX=9606 GN=SERPINA1 PE=1 SV=3, having the following amino acid sequence:

MPSSVSWGILLLAGLCCLVPVSLAEDPQGDAAQKTDTSHHDQDHPTFNKI
TPNLAEFAFSLYRQLAHQSNSTNIFFSPVSIATAFAMLSLGTKADTHDEI
LEGLNFNLTEIPEAQIHEGFQELLRTLNQPDSQLQLTTGNGLFLSEGLKL
VDKFLEDVKKLYHSEAFTVNFGDTEEAKKQINDYVEKGTQGKIVDLVKEL
DRDTVFALVNYIFFKGKWERPFEVKDTEEEDFHVDQVTTVKVPMMKRLGM
FNIQHCKKLSSWVLLMKYLGNATAIFFLPDEGKLQHLENELTHDIITKFL
ENEDRRSASLHLPKLSITGTYDLKSVLGQLGITKVFSNGADLSGVTEEAP
LKLSKAVHKAVLTIDEKGTEAAGAMFLEAIPMSIPPEVKFNKPEVFLMIE
QNTKSPLFMGKVVNPTQK.

In this A1A•T protein sequence, the first 24 amino acids constitute the signal peptide (underlined). Position 342 of the sequence, which is mutated in A1AD (i.e., E342K), is determined based on setting amino acid residue “E” following the signal sequence as amino acid “1”.

[0118] “Administering” is referred to herein as providing one or more compositions described herein to a patient or a subject. By way of example and without limitation, composition administration, e.g., injection, can be performed by intravenous (i.v.) injection, sub-cutaneous (s.c.) injection, intradermal (i.d.) injection, intraperitoneal (i.p.) injection, or intramuscular (i.m.) injection. One or more such routes can be employed. Parenteral administration can be, for example, by bolus injection or by gradual perfusion over time. Alternatively, or concurrently, administration can be by an oral route.

[0119] By “agent” is meant any small molecule chemical compound, antibody, nucleic acid molecule, or polypeptide, or fragments thereof.

[0120] By “alteration” is meant a change (increase or decrease) in the sequence, expression levels, or activity of a gene or polypeptide as detected by standard art known methods, such as those described herein. As used herein, an alteration includes a 10% change in expression levels, a 25% change, a 40% change, and a 50% or greater change in expression levels.

[0121] By “ameliorate” is meant decrease, suppress, attenuate, diminish, arrest, or stabilize the development or progression of a disease.

[0122] By “analog” is meant a molecule that is not identical, but has analogous functional or structural features. For example, a polypeptide analog retains the biological activity of a corresponding naturally-occurring polypeptide, while having certain biochemical modifications that enhance the analog's function relative to a naturally occurring polypeptide. Such biochemical modifications could increase the analog's protease resistance, membrane permeability, or half-life, without altering, for example, ligand binding. An analog may include an unnatural amino acid.

[0123] By “base editor (BE),” or “nucleobase editor (NBE)” is meant an agent that binds a polynucleotide and has nucleobase modifying activity. In various embodiments, the base editor comprises a nucleobase modifying polypeptide (e.g., a deaminase) and a polynucleotide programmable nucleotide binding domain in conjunction with a guide polynucleotide (e.g., guide RNA). In various embodiments, the agent is a biomolecular complex comprising a protein domain having base editing activity, i.e., a domain capable of modifying a base (e.g., A, T, C, G, or U) within a nucleic acid molecule (e.g., DNA). In some embodiments, the polynucleotide programmable DNA binding domain is fused or linked to a deaminase domain. In one embodiment, the agent is a fusion protein comprising one or more domains having base editing activity. In another embodiment, the protein domains having base editing activity are linked to the guide RNA (e.g., via an RNA binding motif on the guide RNA and an RNA binding domain fused to the deaminase). In some embodiments, the domains having base editing activity are capable of deaminating a base within a nucleic acid molecule. In some embodiments, the base editor is capable of deaminating one or more bases within a DNA molecule. In some embodiments, the base editor is capable of deaminating a cytosine (C) or an adenosine (A) within DNA. In some embodiments, the base editor is capable of deaminating a cytosine (C) and an adenosine (A) within DNA. In some embodiments, the base editor is a cytidine base editor (CBE). In some embodiments, the base editor is an adenosine base editor (ABE). In some embodiments, the base editor is an adenosine base editor (ABE) and a cytidine base editor (CBE). In some embodiments, the base editor is a nuclease-inactive Cas9 (dCas9) fused to an adenosine deaminase. In some embodiments, the Cas9 is a circular permutant Cas9 (e.g., spCas9 or saCas9). Circular permutant Cas9s are known in the art and described, for example, in Oakes et al., Cell 176, 254-267, 2019. In some embodiments, the base editor is fused to an inhibitor of base excision repair, for example, a UGI domain, or a dISN domain. In some embodiments, the fusion protein comprises a Cas9 nickase fused to a deaminase and an inhibitor of base excision repair, such as a UGI or dISN domain. In other embodiments the base editor is an abasic base editor.

[0124] In some embodiments, an adenosine deaminase is evolved from TadA. In some embodiments, the polynucleotide programmable DNA binding domain is a CRISPR associated (e.g., Cas or Cpf1) enzyme. In some embodiments, the base editor is a catalytically dead Cas9 (dCas9) fused to a deaminase domain. In some embodiments, the base editor is a Cas9 nickase (nCas9) fused to a deaminase domain. In some embodiments, the base editor is fused to an inhibitor of base excision repair (BER). In some embodiments, the inhibitor of base excision repair is a uracil DNA glycosylase inhibitor (UGI). In some embodiments, the inhibitor of base excision repair is an inosine base excision repair inhibitor. Details of base editors are described in International PCT Application Nos. PCT/2017/045381 (WO2018/027078) and PCT/US2016/058344 (WO2017/070632), each of which is incorporated herein by reference for its entirety. Also see Komor, A. C., et al., “Programmable editing of a target base in genomic DNA without double-stranded DNA cleavage” Nature 533, 420-424 (2016); Gaudelli, N. M., et al., “Programmable base editing of A•T to G•C in genomic DNA without DNA cleavage” Nature 551, 464-471 (2017); Komor, A. C., et al., “Improved base excision repair inhibition and bacteriophage Mu Gam protein yields C:G-to-T:A base editors with higher efficiency and product purity” Science Advances 3:eaao4774 (2017), and Rees, H. A., et al., “Base editing: precision chemistry on the genome and transcriptome of living cells.” Nat Rev Genet. 2018 December; 19(12):770-788. doi: 10.1038/s41576-018-0059-1, the entire contents of which are hereby incorporated by reference.

[0125] In some embodiments, base editors are generated (e.g., ABE8 or ABE9) by cloning an adenosine deaminase variant (e.g., TadA*8) into a scaffold that includes a circular permutant Cas9 (e.g., spCAS9) and a bipartite nuclear localization sequence. Circular permutant Cas9s are known in the art and described, for example, in Oakes et al., Cell 176, 254-267, 2019. Exemplary circular permutant sequences are set forth below, in which the bold sequence indicates sequence derived from Cas9, the italics sequence denotes a linker sequence, and the underlined sequence denotes a bipartite nuclear localization sequence.

CP5 (with MSP “NGC=Pam Variant with mutations Regular Cas9 likes NGG” PID=Protein Interacting Domain and “D10A” nickase):

EIGKATAKYFFYSNIMNFFKTEITLANGEIRKRPLIETNGETGEIVWDKG
RDFATVRKVLSMPQVNIVKKTEVQTGGFSKESILPKRNSDKLIARKKDWD
PKKYGGFMQPTVAYSVLVVAKVEKGKSKKLKSVKELLGITIMERSSFEKN
PIDFLEAKGYKEVKKDLIIKLPKYSLFELENGRKRMLASAKFLQKGNELA
LPSKYVNFLYLASHYEKLKGSPEDNEQKQLFVEQHKHYLDEIIEQISEFS
KRVILADANLDKVLSAYNKHRDKPIREQAENIIHLFTLTNLGAPRAFKYF
DTTIARKEYRSTKEVLDATLIHQSITGLYETRIDLSQLGGDGGSGGSGGS
GGSGGSGGSGGMDKKYSIGLAIGTNSVGWAVITDEYKVPSKKFKVLGNTD
RHSIKKNLIGALLFDSGETAEATRLKRTARRRYTRRKNRICYLQEIFSNE
MAKVDDSFFHRLEESFLVEEDKKHERHPIFGNIVDEVAYHEKYPTIYHLR
KKLVDSTDKADLRLIYLALAHMIKFRGHFLIEGDLNPDNSDVDKLFIQLV
QTYNQLFEENPINASGVDAKAILSARLSKSRRLENLIAQLPGEKKNGLFG
NLIALSLGLTPNFKSNFDLAEDAKLQLSKDTYDDDLDNLLAQIGDQYADL
FLAAKNLSDAILLSDILRVNTEITKAPLSASMIKRYDEHHQDLTLLKALV
RQQLPEKYKEIFFDQSKNGYAGYIDGGASQEEFYKFIKPILEKMDGTEEL
LVKLNREDLLRKQRTFDNGSIPHQIHLGELHAILRRQEDFYPFLKDNREK
IEKILTFRIPYYVGPLARGNSRFAWMTRKSEETITPWNFEEVVDKGASAQ
SFIERMTNFDKNLPNEKVLPKHSLLYEYFTVYNELTKVKYVTEGMRKPAF
LSGEQKKAIVDLLFKTNRKVTVKQLKEDYFKKIECFDSVEISGVEDRFNA
SLGTYHDLLKIIKDKDFLDNEENEDILEDIVLTLTLFEDREMIEERLKTY
AHLFDDKVMKQLKRRRYTGWGRLSRKLINGIRDKQSGKTILDFLKSDGFA
NRNEMQLIHDDSLTFKEDIQKAQVSGQGDSLHEHIANLAGSPAIKKGILQ
TVKVVDELVKVMGRHKPENIVIEMARENQTTQKGQKNSRERMKRIEEGIK
ELGSQILKEHPVENTQLQNEKLYLYYLQNGRDMYVDQELDINRLSDYDVD
HIVPQSFLKDDSIDNKVLTRSDKNRGKSDNVPSEEVVKKMKNYWRQLLNA
KLITQRKFDNLTKAERGGLSELDKAGFIKRQLVETRQITKHVAQILDSRM
NTKYDENDKLIREVKVITLKSKLVSDFRKDFQFYKVREINNYHHAHDAYL
NAVVGTALIKKYPKLESEFVYGDYKVYDVRKMIAKSEQEGADKRTADGSE
FESPKKKRKV*

[0126] In some embodiments, the ABE8 is selected from a base editor from Table 10, 11 or 13 infra. In some embodiments, ABE8 contains an adenosine deaminase variant evolved from TadA. In some embodiments, the adenosine deaminase variant of ABE8 is a TadA*8 variant as described in Table 8, 10, 11, or 13 infra. In some embodiments, the adenosine deaminase variant is the TadA*7.10 variant (e.g., TadA*8) comprising one or more of an alteration selected from the group consisting of Y147T, Y147R, Q154S, Y123H, V82S, T166R, and/or Q154R. In various embodiments, ABE8 comprises TadA*7.10 variant (e.g. TadA*8) with a combination of alterations selected from the group of Y147T+Q154R; Y147T+Q154S; Y147R+Q154S; V82S+Q154S; V82S+Y147R; V82S+Q154R; V82S+Y123H; I76Y+V82S; V82S+Y123H+Y147T; V82S+Y123H+Y147R; V82S+Y123H+Q154R; Y147R+Q154R+Y123H; Y147R+Q154R+I76Y; Y147R+Q154R+T166R; Y123H+Y147R+Q154R+I76Y; V82S+Y123H+Y147R+Q154R; and I76Y+V82S+Y123H+Y147R+Q154R.

[0127] In some embodiments, the ABE8 is a monomeric construct containing one copy of a TadA deaminase, e.g., a TadA*8 variant. In some embodiments, the ABE8 is a dimeric or heterodimeric construct containing more than one, e.g., two, copies of the same or different TadA deaminase, e.g., a wild-type TadA and a TadA*8 variant.

[0128] In some embodiments, the ABE9 is selected from a base editor from Table 14 infra. In some embodiments, ABE9 contains an adenosine deaminase variant evolved from TadA. In some embodiments, the adenosine deaminase variant of ABE9 is a TadA*7.10 variant as described in Table 14. In some embodiments, the adenosine deaminase variant is TadA*7.10 comprising one or more alterations selected from the group consisting of Y147T, Y147R, Q154S, Y123H, V82S, T166R, Q154R. In various embodiments, ABE9 comprises TadA*7.10 with alterations selected from the following: Y147R+Q154R+Y123H; Y147R+Q154R+I76Y; Y147R+Q154R+T166R; Y147T+Q154R; Y147T+Q154S; V82S+Q154S; V82T+Q154S and Y123H+Y147R+Q154R+I76Y, in addition to those listed in Table 14. In some embodiments, the ABE9 is a monomeric construct containing one copy of a TadA deaminase, e.g., a TadA*9 variant. In some embodiments, the ABE9 is a dimeric or heterodimeric construct containing more than one, e.g., two, copies of the same or different TadA deaminase, e.g., a wild-type TadA and a TadA*9 variant.

[0129] In some embodiments the ABE9 base editor comprises the sequence:

MSEVEFSHEYWMRHALTLAKRARDEREVPVGAVLVLNNRVIGEGWNRAIG
LHDPTAHAEIMALRQGGLVMQNYRLIDATLYVTFEPCVMCAGAMIHSRIG
RVVFGVRNAKTGAAGSLMDVLHYPGMNHRVEITEGILADECAALLCTFFR
MPRQVFNAQKKAQSSTD.

[0130] By way of example, the adenine base editor ABE to be used in the base editing compositions, systems and methods described herein has the nucleic acid sequence (8877 base pairs), (Addgene, Watertown, Mass.; Gaudelli N M, et al., Nature. 2017 Nov. 23; 551(7681):464-471. doi: 10.1038/nature24644; Koblan L W, et al., Nat Biotechnol. 2018 October; 36(9):843-846. doi: 10.1038/nbt.4172.) as provided below. Polynucleotide sequences having at least 95% or greater identity to the ABE nucleic acid sequence are also encompassed.

ATATGCCAAGTACGCCCCCTATTGACGTCAATGACGGTAAATGGCCCGCCTGGCATTATGCCCAGTACAT
GACCTTATGGGACTTTCCTACTTGGCAGTACATCTACGTATTAGTCATCGCTATTACCATGGTGATGCGG
TTTTGGCAGTACATCAATGGGCGTGGATAGCGGTTTGACTCACGGGGATTTCCAAGTCTCCACCCCATTG
ACGTCAATGGGAGTTTGTTTTGGCACCAAAATCAACGGGACTTTCCAAAATGTCGTAACAACTCCGCCCC
ATTGACGCAAATGGGCGGTAGGCGTGTACGGTGGGAGGTCTATATAAGCAGAGCTGGTTTAGTGAACCGT
CAGATCCGCTAGAGATCCGCGGCCGCTAATACGACTCACTATAGGGAGAGCCGCCACCATGAAACGGACA
GCCGACGGAAGCGAGTTCGAGTCACCAAAGAAGAAGCGGAAAGTCTCTGAAGTCGAGTTTAGCCACGAGT
ATTGGATGAGGCACGCACTGACCCTGGCAAAGCGAGCATGGGATGAAAGAGAAGTCCCCGTGGGCGCCGT
GCTGGTGCACAACAATAGAGTGATCGGAGAGGGATGGAACAGGCCAATCGGCCGCCACGACCCTACCGCA
CACGCAGAGATCATGGCACTGAGGCAGGGAGGCCTGGTCATGCAGAATTACCGCCTGATCGATGCCACCC
TGTATGTGACACTGGAGCCATGCGTGATGTGCGCAGGAGCAATGATCCACAGCAGGATCGGAAGAGTGGT
GTTCGGAGCACGGGACGCCAAGACCGGCGCAGCAGGCTCCCTGATGGATGTGCTGCACCACCCCGGCATG
AACCACCGGGTGGAGATCACAGAGGGAATCCTGGCAGACGAGTGCGCCGCCCTGCTGAGCGATTTCTTTA
GAATGCGGAGACAGGAGATCAAGGCCCAGAAGAAGGCACAGAGCTCCACCGACTCTGGAGGATCTAGCGG
AGGATCCTCTGGAAGCGAGACACCAGGCACAAGCGAGTCCGCCACACCAGAGAGCTCCGGCGGCTCCTCC
GGAGGATCCTCTGAGGTGGAGTTTTCCCACGAGTACTGGATGAGACATGCCCTGACCCTGGCCAAGAGGG
CACGCGATGAGAGGGAGGTGCCTGTGGGAGCCGTGCTGGTGCTGAACAATAGAGTGATCGGCGAGGGCTG
GAACAGAGCCATCGGCCTGCACGACCCAACAGCCCATGCCGAAATTATGGCCCTGAGACAGGGCGGCCTG
GTCATGCAGAACTACAGACTGATTGACGCCACCCTGTACGTGACATTCGAGCCTTGCGTGATGTGCGCCG
GCGCCATGATCCACTCTAGGATCGGCCGCGTGGTGTTTGGCGTGAGGAACGCAAAAACCGGCGCCGCAGG
CTCCCTGATGGACGTGCTGCACTACCCCGGCATGAATCACCGCGTCGAAATTACCGAGGGAATCCTGGCA
GATGAATGTGCCGCCCTGCTGTGCTATTTCTTTCGGATGCCTAGACAGGTGTTCAATGCTCAGAAGAAGG
CCCAGAGCTCCACCGACTCCGGAGGATCTAGCGGAGGCTCCTCTGGCTCTGAGACACCTGGCACAAGCGA
GAGCGCAACACCTGAAAGCAGCGGGGGCAGCAGCGGGGGGTCAGACAAGAAGTACAGCATCGGCCTGGCC
ATCGGCACCAACTCTGTGGGCTGGGCCGTGATCACCGACGAGTACAAGGTGCCCAGCAAGAAATTCAAGG
TGCTGGGCAACACCGACCGGCACAGCATCAAGAAGAACCTGATCGGAGCCCTGCTGTTCGACAGCGGCGA
AACAGCCGAGGCCACCCGGCTGAAGAGAACCGCCAGAAGAAGATACACCAGACGGAAGAACCGGATCTGC
TATCTGCAAGAGATCTTCAGCAACGAGATGGCCAAGGTGGACGACAGCTTCTTCCACAGACTGGAAGAGT
CCTTCCTGGTGGAAGAGGATAAGAAGCACGAGCGGCACCCCATCTTCGGCAACATCGTGGACGAGGTGGC
CTACCACGAGAAGTACCCCACCATCTACCACCTGAGAAAGAAACTGGTGGACAGCACCGACAAGGCCGAC
CTGCGGCTGATCTATCTGGCCCTGGCCCACATGATCAAGTTCCGGGGCCACTTCCTGATCGAGGGCGACC
TGAACCCCGACAACAGCGACGTGGACAAGCTGTTCATCCAGCTGGTGCAGACCTACAACCAGCTGTTCGA
GGAAAACCCCATCAACGCCAGCGGCGTGGACGCCAAGGCCATCCTGTCTGCCAGACTGAGCAAGAGCAGA
CGGCTGGAAAATCTGATCGCCCAGCTGCCCGGCGAGAAGAAGAATGGCCTGTTCGGAAACCTGATTGCCC
TGAGCCTGGGCCTGACCCCCAACTTCAAGAGCAACTTCGACCTGGCCGAGGATGCCAAACTGCAGCTGAG
CAAGGACACCTACGACGACGACCTGGACAACCTGCTGGCCCAGATCGGCGACCAGTACGCCGACCTGTTT
CTGGCCGCCAAGAACCTGTCCGACGCCATCCTGCTGAGCGACATCCTGAGAGTGAACACCGAGATCACCA
AGGCCCCCCTGAGCGCCTCTATGATCAAGAGATACGACGAGCACCACCAGGACCTGACCCTGCTGAAAGC
TCTCGTGCGGCAGCAGCTGCCTGAGAAGTACAAAGAGATTTTCTTCGACCAGAGCAAGAACGGCTACGCC
GGCTACATTGACGGCGGAGCCAGCCAGGAAGAGTTCTACAAGTTCATCAAGCCCATCCTGGAAAAGATGG
ACGGCACCGAGGAACTGCTCGTGAAGCTGAACAGAGAGGACCTGCTGCGGAAGCAGCGGACCTTCGACAA
CGGCAGCATCCCCCACCAGATCCACCTGGGAGAGCTGCACGCCATTCTGCGGCGGCAGGAAGATTTTTAC
CCATTCCTGAAGGACAACCGGGAAAAGATCGAGAAGATCCTGACCTTCCGCATCCCCTACTACGTGGGCC
CTCTGGCCAGGGGAAACAGCAGATTCGCCTGGATGACCAGAAAGAGCGAGGAAACCATCACCCCCTGGAA
CTTCGAGGAAGTGGTGGACAAGGGCGCTTCCGCCCAGAGCTTCATCGAGCGGATGACCAACTTCGATAAG
AACCTGCCCAACGAGAAGGTGCTGCCCAAGCACAGCCTGCTGTACGAGTACTTCACCGTGTATAACGAGC
TGACCAAAGTGAAATACGTGACCGAGGGAATGAGAAAGCCCGCCTTCCTGAGCGGCGAGCAGAAAAAGGC
CATCGTGGACCTGCTGTTCAAGACCAACCGGAAAGTGACCGTGAAGCAGCTGAAAGAGGACTACTTCAAG
AAAATCGAGTGCTTCGACTCCGTGGAAATCTCCGGCGTGGAAGATCGGTTCAACGCCTCCCTGGGCACAT
ACCACGATCTGCTGAAAATTATCAAGGACAAGGACTTCCTGGACAATGAGGAAAACGAGGACATTCTGGA
AGATATCGTGCTGACCCTGACACTGTTTGAGGACAGAGAGATGATCGAGGAACGGCTGAAAACCTATGCC
CACCTGTTCGACGACAAAGTGATGAAGCAGCTGAAGCGGCGGAGATACACCGGCTGGGGCAGGCTGAGCC
GGAAGCTGATCAACGGCATCCGGGACAAGCAGTCCGGCAAGACAATCCTGGATTTCCTGAAGTCCGACGG
CTTCGCCAACAGAAACTTCATGCAGCTGATCCACGACGACAGCCTGACCTTTAAAGAGGACATCCAGAAA
GCCCAGGTGTCCGGCCAGGGCGATAGCCTGCACGAGCACATTGCCAATCTGGCCGGCAGCCCCGCCATTA
AGAAGGGCATCCTGCAGACAGTGAAGGTGGTGGACGAGCTCGTGAAAGTGATGGGCCGGCACAAGCCCGA
GAACATCGTGATCGAAATGGCCAGAGAGAACCAGACCACCCAGAAGGGACAGAAGAACAGCCGCGAGAGA
ATGAAGCGGATCGAAGAGGGCATCAAAGAGCTGGGCAGCCAGATCCTGAAAGAACACCCCGTGGAAAACA
CCCAGCTGCAGAACGAGAAGCTGTACCTGTACTACCTGCAGAATGGGCGGGATATGTACGTGGACCAGGA
ACTGGACATCAACCGGCTGTCCGACTACGATGTGGACCATATCGTGCCTCAGAGCTTTCTGAAGGACGAC
TCCATCGACAACAAGGTGCTGACCAGAAGCGACAAGAACCGGGGCAAGAGCGACAACGTGCCCTCCGAAG
AGGTCGTGAAGAAGATGAAGAACTACTGGCGGCAGCTGCTGAACGCCAAGCTGATTACCCAGAGAAAGTT
CGACAATCTGACCAAGGCCGAGAGAGGCGGCCTGAGCGAACTGGATAAGGCCGGCTTCATCAAGAGACAG
CTGGTGGAAACCCGGCAGATCACAAAGCACGTGGCACAGATCCTGGACTCCCGGATGAACACTAAGTACG
ACGAGAATGACAAGCTGATCCGGGAAGTGAAAGTGATCACCCTGAAGTCCAAGCTGGTGTCCGATTTCCG
GAAGGATTTCCAGTTTTACAAAGTGCGCGAGATCAACAACTACCACCACGCCCACGACGCCTACCTGAAC
GCCGTCGTGGGAACCGCCCTGATCAAAAAGTACCCTAAGCTGGAAAGCGAGTTCGTGTACGGCGACTACA
AGGTGTACGACGTGCGGAAGATGATCGCCAAGAGCGAGCAGGAAATCGGCAAGGCTACCGCCAAGTACTT
CTTCTACAGCAACATCATGAACTTTTTCAAGACCGAGATTACCCTGGCCAACGGCGAGATCCGGAAGCGG
CCTCTGATCGAGACAAACGGCGAAACCGGGGAGATCGTGTGGGATAAGGGCCGGGATTTTGCCACCGTGC
GGAAAGTGCTGAGCATGCCCCAAGTGAATATCGTGAAAAAGACCGAGGTGCAGACAGGCGGCTTCAGCAA
AGAGTCTATCCTGCCCAAGAGGAACAGCGATAAGCTGATCGCCAGAAAGAAGGACTGGGACCCTAAGAAG
TACGGCGGCTTCGACAGCCCCACCGTGGCCTATTCTGTGCTGGTGGTGGCCAAAGTGGAAAAGGGCAAGT
CCAAGAAACTGAAGAGTGTGAAAGAGCTGCTGGGGATCACCATCATGGAAAGAAGCAGCTTCGAGAAGAA
TCCCATCGACTTTCTGGAAGCCAAGGGCTACAAAGAAGTGAAAAAGGACCTGATCATCAAGCTGCCTAAG
TACTCCCTGTTCGAGCTGGAAAACGGCCGGAAGAGAATGCTGGCCTCTGCCGGCGAACTGCAGAAGGGAA
ACGAACTGGCCCTGCCCTCCAAATATGTGAACTTCCTGTACCTGGCCAGCCACTATGAGAAGCTGAAGGG
CTCCCCCGAGGATAATGAGCAGAAACAGCTGTTTGTGGAACAGCACAAGCACTACCTGGACGAGATCATC
GAGCAGATCAGCGAGTTCTCCAAGAGAGTGATCCTGGCCGACGCTAATCTGGACAAAGTGCTGTCCGCCT
ACAACAAGCACCGGGATAAGCCCATCAGAGAGCAGGCCGAGAATATCATCCACCTGTTTACCCTGACCAA
TCTGGGAGCCCCTGCCGCCTTCAAGTACTTTGACACCACCATCGACCGGAAGAGGTACACCAGCACCAAA
GAGGTGCTGGACGCCACCCTGATCCACCAGAGCATCACCGGCCTGTACGAGACACGGATCGACCTGTCTC
AGCTGGGAGGTGACTCTGGCGGCTCAAAAAGAACCGCCGACGGCAGCGAATTCGAGCCCAAGAAGAAGAG
GAAAGTCTAACCGGTCATCATCACCATCACCATTGAGTTTAAACCCGCTGATCAGCCTCGACTGTGCCTT
CTAGTTGCCAGCCATCTGTTGTTTGCCCCTCCCCCGTGCCTTCCTTGACCCTGGAAGGTGCCACTCCCAC
TGTCCTTTCCTAATAAAATGAGGAAATTGCATCGCATTGTCTGAGTAGGTGTCATTCTATTCTGGGGGGT
GGGGTGGGGCAGGACAGCAAGGGGGAGGATTGGGAAGACAATAGCAGGCATGCTGGGGATGCGGTGGGCT
CTATGGCTTCTGAGGCGGAAAGAACCAGCTGGGGCTCGATACCGTCGACCTCTAGCTAGAGCTTGGCGTA
ATCATGGTCATAGCTGTTTCCTGTGTGAAATTGTTATCCGCTCACAATTCCACACAACATACGAGCCGGA
AGCATAAAGTGTAAAGCCTAGGGTGCCTAATGAGTGAGCTAACTCACATTAATTGCGTTGCGCTCACTGC
CCGCTTTCCAGTCGGGAAACCTGTCGTGCCAGCTGCATTAATGAATCGGCCAACGCGCGGGGAGAGGCGG
TTTGCGTATTGGGCGCTCTTCCGCTTCCTCGCTCACTGACTCGCTGCGCTCGGTCGTTCGGCTGCGGCGA
GCGGTATCAGCTCACTCAAAGGCGGTAATACGGTTATCCACAGAATCAGGGGATAACGCAGGAAAGAACA
TGTGAGCAAAAGGCCAGCAAAAGGCCAGGAACCGTAAAAAGGCCGCGTTGCTGGCGTTTTTCCATAGGCT
CCGCCCCCCTGACGAGCATCACAAAAATCGACGCTCAAGTCAGAGGTGGCGAAACCCGACAGGACTATAA
AGATACCAGGCGTTTCCCCCTGGAAGCTCCCTCGTGCGCTCTCCTGTTCCGACCCTGCCGCTTACCGGAT
ACCTGTCCGCCTTTCTCCCTTCGGGAAGCGTGGCGCTTTCTCATAGCTCACGCTGTAGGTATCTCAGTTC
GGTGTAGGTCGTTCGCTCCAAGCTGGGCTGTGTGCACGAACCCCCCGTTCAGCCCGACCGCTGCGCCTTA
TCCGGTAACTATCGTCTTGAGTCCAACCCGGTAAGACACGACTTATCGCCACTGGCAGCAGCCACTGGTA
ACAGGATTAGCAGAGCGAGGTATGTAGGCGGTGCTACAGAGTTCTTGAAGTGGTGGCCTAACTACGGCTA
CACTAGAAGAACAGTATTTGGTATCTGCGCTCTGCTGAAGCCAGTTACCTTCGGAAAAAGAGTTGGTAGC
TCTTGATCCGGCAAACAAACCACCGCTGGTAGCGGTGGTTTTTTTGTTTGCAAGCAGCAGATTACGCGCA
GAAAAAAAGGATCTCAAGAAGATCCTTTGATCTTTTCTACGGGGTCTGACACTCAGTGGAACGAAAACTC
ACGTTAAGGGATTTTGGTCATGAGATTATCAAAAAGGATCTTCACCTAGATCCTTTTAAATTAAAAATGA
AGTTTTAAATCAATCTAAAGTATATATGAGTAAACTTGGTCTGACAGTTACCAATGCTTAATCAGTGAGG
CACCTATCTCAGCGATCTGTCTATTTCGTTCATCCATAGTTGCCTGACTCCCCGTCGTGTAGATAACTAC
GATACGGGAGGGCTTACCATCTGGCCCCAGTGCTGCAATGATACCGCGAGACCCACGCTCACCGGCTCCA
GATTTATCAGCAATAAACCAGCCAGCCGGAAGGGCCGAGCGCAGAAGTGGTCCTGCAACTTTATCCGCCT
CCATCCAGTCTATTAATTGTTGCCGGGAAGCTAGAGTAAGTAGTTCGCCAGTTAATAGTTTGCGCAACGT
TGTTGCCATTGCTACAGGCATCGTGGTGTCACGCTCGTCGTTTGGTATGGCTTCATTCAGCTCCGGTTCC
CAACGATCAAGGCGAGTTACATGATCCCCCATGTTGTGCAAAAAAGCGGTTAGCTCCTTCGGTCCTCCGA
TCGTTGTCAGAAGTAAGTTGGCCGCAGTGTTATCACTCATGGTTATGGCAGCACTGCATAATTCTCTTAC
TGTCATGCCATCCGTAAGATGCTTTTCTGTGACTGGTGAGTACTCAACCAAGTCATTCTGAGAATAGTGT
ATGCGGCGACCGAGTTGCTCTTGCCCGGCGTCAATACGGGATAATACCGCGCCACATAGCAGAACTTTAA
AAGTGCTCATCATTGGAAAACGTTCTTCGGGGCGAAAACTCTCAAGGATCTTACCGCTGTTGAGATCCAG
TTCGATGTAACCCACTCGTGCACCCAACTGATCTTCAGCATCTTTTACTTTCACCAGCGTTTCTGGGTGA
GCAAAAACAGGAAGGCAAAATGCCGCAAAAAAGGGAATAAGGGCGACACGGAAATGTTGAATACTCATAC
TCTTCCTTTTTCAATATTATTGAAGCATTTATCAGGGTTATTGTCTCATGAGCGGATACATATTTGAATG
TATTTAGAAAAATAAACAAATAGGGGTTCCGCGCACATTTCCCCGAAAAGTGCCACCTGACGTCGACGGA
TCGGGAGATCGATCTCCCGATCCCCTAGGGTCGACTCTCAGTACAATCTGCTCTGATGCCGCATAGTTAA
GCCAGTATCTGCTCCCTGCTTGTGTGTTGGAGGTCGCTGAGTAGTGCGCGAGCAAAATTTAAGCTACAAC
AAGGCAAGGCTTGACCGACAATTGCATGAAGAATCTGCTTAGGGTTAGGCGTTTTGCGCTGCTTCGCGAT
GTACGGGCCAGATATACGCGTTGACATTGATTATTGACTAGTTATTAATAGTAATCAATTACGGGGTCAT
TAGTTCATAGCCCATATATGGAGTTCCGCGTTACATAACTTACGGTAAATGGCCCGCCTGGCTGACCGCC
CAACGACCCCCGCCCATTGACGTCAATAATGACGTATGTTCCCATAGTAACGCCAATAGGGACTTTCCAT
TGACGTCAATGGGTGGAGTATTTACGGTAAACTGCCCACTTGGCAGTACATCAAGTGTATC

[0131] By “base editing activity” is meant acting to chemically alter a base within a polynucleotide. In one embodiment, a first base is converted to a second base. In one embodiment, the base editing activity is cytidine deaminase activity, e.g., converting target C•G to T•A. In another embodiment, the base editing activity is adenosine or adenine deaminase activity, e.g., converting A•T to G•C. In another embodiment, the base editing activity is cytidine deaminase activity, e.g., converting target C•G to T•A and adenosine or adenine deaminase activity, e.g., converting A•T to G•C.

[0132] The term “base editor system” refers to a system for editing a nucleobase of a target nucleotide sequence. In various embodiments, the base editor (BE) system comprises (1) a polynucleotide programmable nucleotide binding domain, a deaminase domain (e.g., a cytidine deaminase or adenosine deaminase) for deaminating nucleobases in the target nucleotide sequence; and (2) one or more guide polynucleotides (e.g., guide RNA) in conjunction with the polynucleotide programmable nucleotide binding domain. In various embodiments, the base editor (BE) system comprises a nucleobase editor domain selected from an adenosine deaminase or a cytidine deaminase, and a domain having nucleic acid sequence specific binding activity. In some embodiments, the base editor system comprises (1) a base editor (BE) comprising a polynucleotide programmable DNA binding domain and a deaminase domain for deaminating one or more nucleobases in a target nucleotide sequence; and (2) one or more guide RNAs in conjunction with the polynucleotide programmable DNA binding domain. In some embodiments, the polynucleotide programmable nucleotide binding domain is a polynucleotide programmable DNA binding domain. In some embodiments, the base editor is a cytidine base editor (CBE). In some embodiments, the base editor is an adenine or adenosine base editor (ABE). In some embodiments, the base editor is an adenine or adenosine base editor (ABE) or a cytidine base editor (CBE).

[0133] The term “Cas9” or “Cas9 domain” refers to an RNA guided nuclease comprising a Cas9 protein, or a fragment thereof (e.g., a protein comprising an active, inactive, or partially active DNA cleavage domain of Cas9, and/or the gRNA binding domain of Cas9). A Cas9 nuclease is also referred to sometimes as a casn1 nuclease or a CRISPR (clustered regularly interspaced short palindromic repeat) associated nuclease. An exemplary Cas9, is Streptococcus pyogenes Cas9 (spCas9), the amino acid sequence of which is provided below:

MDKKYSIGLDIGTNSVGWAVITDDYKVPSKKFKVLGNTDRHSIKKNLIGALLFGSGETAEAT
RLKRTARRRYTRRKNRICYLQEIFSNEMAKVDDSFFHRLEESFLVEEDKKHERHPIFGNIVD
EVAYHEKYPTIYHLRKKLADSTDKADLRLIYLALAHMIKFRGHFLIEGDLNPDNSDVDKLFI
QLVQIYNQLFEENPINASRVDAKAILSARLSKSRRLENLIAQLPGEKRNGLFGNLIALSLGL
TPNFKSNFDLAEDAKLQLSKDTYDDDLDNLLAQIGDQYADLFLAAKNLSDAILLSDILRVNS
EITKAPLSASMIKRYDEHHQDLTLLKALVRQQLPEKYKEIFFDQSKNGYAGYIDGGASQEEF
YKFIKPILEKMDGTEELLVKLNREDLLRKQRTFDNGSIPHQIHLGELHAILRRQEDFYPFLK
DNREKIEKILTFRIPYYVGPLARGNSRFAWMTRKSEETITPWNFEEVVDKGASAQSFIERMT
NFDKNLPNEKVLPKHSLLYEYFTVYNELTKVKYVTEGMRKPAFLSGEQKKAIVDLLFKTNRK
VTVKQLKEDYFKKIECFDSVEISGVEDRFNASLGAYHDLLKIIKDKDFLDNEENEDILEDIV
LTLTLEEDRGMIEERLKTYAHLFDDKVMKQLKRRRYTGWGRLSRKLINGIRDKQSGKTILDE
LKSDGFANRNFMQLIHDDSLTFKEDIQKAQVSGQGHSLHEQIANLAGSPAIKKGILQTVKIV
DELVKVMGHKPENIVIEMARENQTTQKGQKNSRERMKRIEEGIKELGSQILKEHPVENTQLQ
NEKLYLYYLQNGRDMYVDQELDINRLSDYDVDHIVPQSFIKDDSIDNKVLTRSDKNRGKSDN
VPSEEVVKKMKNYWRQLLNAKLITQRKFDNLTKAERGGLSELDKAGFIKRQLVETRQITKHV
AQILDSRMNTKYDENDKLIREVKVITLKSKLVSDFRKDFQFYKVREINNYHHAHDAYLNAVV
GTALIKKYPKLESEFVYGDYKVYDVRKMIAKSEQEIGKATAKYFFYSNIMNFFKTEITLANG
EIRKRPLIETNGETGEIVWDKGRDFATVRKVLSMPQVNIVKKTEVQTGGFSKESILPKRNSD
KLIARKKDWDPKKYGGFDSPTVAYSVLVVAKVEKGKSKKLKSVKELLGITIMERSSFEKNPI
DFLEAKGYKEVKKDLIIKLPKYSLFELENGRKRMLASAGELQKGNELALPSKYVNFLYLASH
YEKLKGSPEDNEQKQLFVEQHKHYLDEIIEQISEFSKRVILADANLDKVLSAYNKHRDKPIR
EQAENIIHLFTLTNLGAPAAFKYFDTTIDRKRYTSTKEVLDATLIHQSITGLYETRIDLSQL
GGD (single underline: HNH domain; double underline: RuvC domain)

[0134] The term “Cas12b” or “Cas12b domain” refers to an RNA-guided nuclease comprising a Cas12b/C2c1 protein, or a fragment thereof (e.g., a protein comprising an active, inactive, or partially active DNA cleavage domain of Cas12b, and/or the gRNA binding domain of Cas12b). contents of each of which are incorporated herein by reference). Cas12b orthologs have been described in various species, including, but not limited to, Alicyclobacillus acidoterrestris, Alicyclobacillus acidophilus (Teng et al., Cell Discov. 2018 Nov. 27; 4:63), Bacillus hisashi, and Bacillus sp. V3-13. Additional suitable Cas12b nucleases and sequences will be apparent to those of skill in the art based on this disclosure.

[0135] In some embodiments, proteins comprising Cas12b or fragments thereof are referred to as “Cas12b variants.” A Cas12b variant shares homology to Cas12b, or a fragment thereof. For example, a Cas12b variant is at least about 70% identical, at least about 80% identical, at least about 90% identical, at least about 95% identical, at least about 96% identical, at least about 97% identical, at least about 98% identical, at least about 99% identical, at least about 99.5% identical, or at least about 99.9% identical to wild type Cas12b. In some embodiments, the Cas12b variant may have 1, 2, 3, 4, 5, 6, 7, 8, 9, 10, 11, 12, 13, 14, 15, 16, 17, 18, 19, 20, 21, 22, 21, 24, 25, 26, 27, 28, 29, 30, 31, 32, 33, 34, 35, 36, 37, 38, 39, 40, 41, 42, 43, 44, 45, 46, 47, 48, 49, 50 or more amino acid changes compared to wild type Cas12b. In some embodiments, the Cas12b variant comprises a fragment of Cas12b (e.g., a gRNA binding domain or a DNA-cleavage domain), such that the fragment is at least about 70% identical, at least about 80% identical, at least about 90% identical, at least about 95% identical, at least about 96% identical, at least about 97% identical, at least about 98% identical, at least about 99% identical, at least about 99.5% identical, or at least about 99.9% identical to the corresponding fragment of wild type Cas12b. In some embodiments, the fragment is at least 30%, at least 35%, at least 40%, at least 45%, at least 50%, at least 55%, at least 60%, at least 65%, at least 70%, at least 75%, at least 80%, at least 85%, at least 90%, at least 95% identical, at least 96%, at least 97%, at least 98%, at least 99%, or at least 99.5% of the amino acid length of a corresponding wild type Cas12b. Exemplary Cas12b polypeptides are listed below.

Cas12b/C2c1 (uniprot.org/uniprot/T0D7A2#2) sp|T0D7A2|C2C1_ALIAG CRISPR-
associated endonuclease C2c1 OS = Alicyclobacillus acido- terrestris
(strain ATCC 49025 / DSM 3922/ CIP 106132 /NCIMB 13137/GD3B)
GN = c2c1 PE = 1 SV = 1
MAVKSIKVKLRLDDMPEIRAGLWKLHKEVNAGVRYYTEWLSLLRQENLYRRSPNGDGEQECD
KTAEECKAELLERLRARQVENGHRGPAGSDDELLQLARQLYELLVPQAIGAKGDAQQIARKF
LSPLADKDAVGGLGIAKAGNKPRWVRMREAGEPGWEEEKEKAETRKSADRTADVLRALADFG
LKPLMRVYTDSEMSSVEWKPLRKGQAVRTWDRDMFQQAIERMMSWESWNQRVGQEYAKLVEQ
KNRFEQKNFVGQEHLVHLVNQLQQDMKEASPGLESKEQTAHYVTGRALRGSDKVFEKWGKLA
PDAPFDLYDAEIKNVQRRNTRRFGSHDLFAKLAEPEYQALWREDASFLTRYAVYNSILRKLN
HAKMFATFTLPDATAHPIWTRFDKLGGNLHQYTFLFNEFGERRHAIRFHKLLKVENGVAREV
DDVTVPISMSEQLDNLLPRDPNEPIALYFRDYGAEQHFTGEFGGAKIQCRRDQLAHMHRRRG
ARDVYLNVSVRVQSQSEARGERRPPYAAVFRLVGDNHRAFVHFDKLSDYLAEHPDDGKLGSE
GLLSGLRVMSVDLGLRTSASISVFRVARKDELKPNSKGRVPFFFPIKGNDNLVAVHERSQLL
KLPGETESKDLRAIREERQRTLRQLRTQLAYLRLLVRCGSEDVGRRERSWAKLIEQPVDAAN
HMTPDWREAFENELQKLKSLHGICSDKEWMDAVYESVRRVWRHMGKQVRDWRKDVRSGERPK
IRGYAKDVVGGNSIEQIEYLERQYKFLKSWSFFGKVSGQVIRAEKGSRFAITLREHIDHAKE
DRLKKLADRIIMEALGYVYALDERGKGKWVAKYPPCQLILLEELSEYQFNNDRPPSENNQLM
QWSHRGVFQELINQAQVHDLLVGTMYAAFSSRFDARTGAPGIRCRRVPARCTQEHNPEPFPW
WLNKFVVEHTLDACPLRADDLIPTGEGEIFVSPFSAEEGDFHQIHADLNAAQNLQQRLWSDF
DISQIRLRCDWGEVDGELVLIPRLTGKRTADSYSNKVFYTNTGVTYYERERGKKRRKVFAQE
KLSEEEAELLVEADEAREKSVVLMRDPSGIINRGNWTRQKEFWSMVNQRIEGYLVKQIRSRV
PLQDSACENTGDI
AacCas12b (Alicyclobacillus acidiphilus) - WP_067623834
MAVKSMKVKLRLDNMPEIRAGLWKLHTEVNAGVRYYTEWLSLLRQENLYRRSPNGDGEQECY
KTAEECKAELLERLRARQVENGHCGPAGSDDELLQLARQLYELLVPQAIGAKGDAQQIARKF
LSPLADKDAVGGLGIAKAGNKPRWVRMREAGEPGWEEEKAKAEARKSTDRTADVLRALADFG
LKPLMRVYTDSDMSSVQWKPLRKGQAVRTWDRDMFQQAIERMMSWESWNQRVGEAYAKLVEQ
KSRFEQKNFVGQEHLVQLVNQLQQDMKEASHGLESKEQTAHYLTGRALRGSDKVFEKWEKLD
PDAPFDLYDTEIKNVQRRNTRRFGSHDLFAKLAEPKYQALWREDASFLTRYAVYNSIVRKLN
HAKMFATFTLPDATAHPIWTRFDKLGGNLHQYTFLFNEFGEGRHAIRFQKLLTVEDGVAKEV
DDVTVPISMSAQLDDLLPRDPHELVALYFQDYGAEQHLAGEFGGAKIQYRRDQLNHLHARRG
ARDVYLNLSVRVQSQSEARGERRPPYAAVFRLVGDNHRAFVHFDKLSDYLAEHPDDGKLGSE
GLLSGLRVMSVDLGLRTSASISVFRVARKDELKPNSEGRVPFCFPIEGNENLVAVHERSQLL
KLPGETESKDLRAIREERQRTLRQLRTQLAYLRLLVRCGSEDVGRRERSWAKLIEQPMDANQ
MTPDWREAFEDELQKLKSLYGICGDREWTEAVYESVRRVWRHMGKQVRDWRKDVRSGERPKI
RGYQKDVVGGNSIEQIEYLERQYKFLKSWSFFGKVSGQVIRAEKGSRFAITLREHIDHAKED
RLKKLADRIIMEALGYVYALDDERGKGKWVAKYPPCQLILLEELSEYQFNNDRPPSENNQLM
QWSHRGVFQELLNQAQVHDLLVGTMYAAFSSRFDARTGAPGIRCRRVPARCAREQNPEPFPW
WLNKFVAEHKLDGCPLRADDLIPTGEGEFFVSPFSAEEGDFHQIHADLNAAQNLQRRLWSDF
DISQIRLRCDWGEVDGEPVLIPRTTGKRTADSYGNKVFYTKTGVTYYERERGKKRRKVFAQE
ELSEEEAELLVEADEAREKSVVLMRDPSGIINRGDWTRQKEFWSMVNQRIEGYLVKQIRSRV
RLQESACENTGDI
BhCas12b (Bacillus hisashii) NCBI Reference Sequence: WP_095142515
MAPKKKRKVGIHGVPAAATRSFILKIEPNEEVKKGLWKTHEVLNHGIAYYMNILKLIRQEAI
YEHHEQDPKNPKKVSKAEIQAELWDFVLKMQKCNSFTHEVDKDEVFNILRELYEELVPSSVE
KKGEANQLSNKFLYPLVDPNSQSGKGTASSGRKPRWYNLKIAGDPSWEEEKKKWEEDKKKDP
LAKILGKLAEYGLIPLFIPYTDSNEPIVKEIKWMEKSRNQSVRRLDKDMFIQALERFLSWES
WNLKVKEEYEKVEKEYKTLEERIKEDIQALKALEQYEKERQEQLLRDTLNTNEYRLSKRGLR
GWREIIQKWLKMDENEPSEKYLEVFKDYQRKHPREAGDYSVYEFLSKKENHFIWRNHPEYPY
LYATFCEIDKKKKDAKQQATFTLADPINHPLWVRFEERSGSNLNKYRILTEQLHTEKLKKKL
TVQLDRLIYPTESGGWEEKGKVDIVLLPSRQFYNQIFLDIEEKGKHAFTYKDESIKFPLKGT
LGGARVQFDRDHLRRYPHKVESGNVGRIYFNMTVNIEPTESPVSKSLKIHRDDFPKVVNFKP
KELTEWIKDSKGKKLKSGIESLEIGLRVMSIDLGQRQAAAASIFEVVDQKPDIEGKLFFPIK
GTELYAVHRASFNIKLPGETLVKSREVLRKAREDNLKLMNQKLNFLRNVLHFQQFEDITERE
KRVTKWISRQENSDVPLVYQDELIQIRELMYKPYKDWVAFLKQLHKRLEVEIGKEVKHWRKS
LSDGRKGLYGISLKNIDEIDRTRKFLLRWSLRPTEPGEVRRLEPGQRFAIDQLNHLNALKED
RLKKMANTIIMHALGYCYDVRKKKWQAKNPACQIILFEDLSNYNPYEERSRFENSKLMKWSR
REIPRQVALQGEIYGLQVGEVGAQFSSRFHAKTGSPGIRCSVVTKEKLQDNRFFKNLQREGR
LTLDKIAVLKEGDLYPDKGGEKFISLSKDRKCVTTHADINAAQNLQKRFWTRTHGFYKVYCK
AYQVDGQTVYIPESKDQKQKIIEEFGEGYFILKDGVYEWVNAGKLKIKKGSSKQSSSELVDS
DILKDSFDLASELKGEKLMLYRDPSGNVFPSDKWMAAGVFFGKLERILISKLTNQYSISTIE
DDSSKQSMKRPAATKKAGQAKKKK

The variant termed BvCas12b V4 includes the changes S893R, K846R, and E837G relative to the wild-type sequence above.

BvCas12b (Bacillus sp. V3-13) NCBI Reference
Sequence: WP_101661451.1
MAIRSIKLKMKTNSGTDSIYLRKALWRTHQLINEGIAYYMNLLTLYRQEA
IGDKTKEAYQAELINIIRNQQRNNGSSEEHGSDQEILALLRQLYELIIPS
SIGESGDANQLGNKFLYPLVDPNSQSGKGTSNAGRKPRWKRLKEEGNPDW
ELEKKKDEERKAKDPTVKIFDNLNKYGLLPLFPLFTNIQKDIEWLPLGKR
QSVRKWDKDMFIQAIERLLSWESWNRRVADEYKQLKEKTESYYKEHLTGG
EEWIEKIRKFEKERNMELEKNAFAPNDGYFITSRQIRGWDRVYEKWSKLP
ESASPEELWKVVAEQQNKMSEGFGDPKVFSFLANRENRDIWRGHSERIYH
IAAYNGLQKKLSRTKEQATFTLPDAIEHPLWIRYESPGGTNLNLFKLEEK
QKKNYYVTLSKIIWPSEEKWIEKENIEIPLAPSIQFNRQIKLKQHVKGKQ
EISFSDYSSRISLDGVLGGSRIQFNRKYIKNHKELLGEGDIGPVFFNLVV
DVAPLQETRNGRLQSPIGKALKVISSDFSKVIDYKPKELMDWMNTGSASN
SFGVASLLEGMRVMSIDMGQRTSASVSIFEVVKELPKDQEQKLFYSINDT
ELFAIHKRSFLLNLPGEVVTKNNKQQRQERRKKRQFVRSQIRMLANVLRL
ETKKTPDERKKAIHKLMEIVQSYDSWTASQKEVWEKELNLLTNMAAFNDE
IWKESLVELHHRIEPYVGQIVSKWRKGLSEGRKNLAGISMWNIDELEDTR
RLLISWSKRSRTPGEANRIETDEPFGSSLLQHIQNVKDDRLKQMANLIIM
TALGFKYDKEEKDRYKRWKETYPACQIILFENLNRYLFNLDRSRRENSRL
MKWAHRSIPRTVSMQGEMFGLQVGDVRSEYSSRFHAKTGAPGIRCHALTE
EDLKAGSNTLKRLIEDGFINESELAYLKKGDIIPSQGGELFVTLSKRYKK
DSDNNELTVIHADINAAQNLQKRFWQQNSEVYRVPCQLARMGEDKLYIPK
SQTETIKKYFGKGSFVKNNTEQEVYKWEKSEKMKIKTDTTFDLQDLDGFE
DISKTIELAQEQQKKYLTMFRDPSGYFFNNETWRPQKEYWSIVNNIIKSC
LKKKILSNKVEL.

[0136] The term “conservative amino acid substitution” or “conservative mutation” refers to the replacement of one amino acid by another amino acid with a common property. A functional way to define common properties between individual amino acids is to analyze the normalized frequencies of amino acid changes between corresponding proteins of homologous organisms (Schulz, G. E. and Schirmer, R. H., Principles of Protein Structure, Springer-Verlag, New York (1979)). According to such analyses, groups of amino acids can be defined where amino acids within a group exchange preferentially with each other, and therefore resemble each other most in their impact on the overall protein structure (Schulz, G. E. and Schirmer, R. H., supra). Non-limiting examples of conservative mutations include amino acid substitutions of amino acids, for example, lysine for arginine and vice versa such that a positive charge can be maintained; glutamic acid for aspartic acid and vice versa such that a negative charge can be maintained; serine for threonine such that a free —OH can be maintained; and glutamine for asparagine such that a free —NH₂ can be maintained.

[0137] The term “coding sequence” or “protein coding sequence” as used interchangeably herein refers to a segment of a polynucleotide that codes for a protein. Coding sequences can also be referred to as open reading frames. The region or sequence is bounded nearer the 5′ end by a start codon and nearer the 3′ end with a stop codon. Stop codons useful with the base editors described herein include the following:

| | |
|---|---|
| Glutamine | CAG → TAG Stop codon |
| | CAA → TAA |
| Arginine | CGA → TGA |
| Tryptophan | TGG → TGA |
| | TGG → TAG |
| | TGG →_TAA |

[0138] By “cytidine deaminase” is meant a polypeptide or fragment thereof capable of catalyzing a deamination reaction that converts an amino group to a carbonyl group. In one embodiment, the cytidine deaminase converts cytosine to uracil or 5-methylcytosine to thymine. PmCDA1, which is derived from Petromyzon marinus (Petromyzon marinus cytosine deaminase 1, “PmCDA1”), AID (Activation-induced cytidine deaminase; AICDA), which is derived from a mammal (e.g., human, swine, bovine, horse, monkey etc.), and APOBEC are exemplary cytidine deaminases.

[0139] The term “deaminase” or “deaminase domain,” as used herein, refers to a protein or enzyme that catalyzes a deamination reaction. In some embodiments, the deaminase or deaminase domain is a cytidine deaminase, catalyzing the hydrolytic deamination of cytidine or deoxycytidine to uridine or deoxyuridine, respectively. In some embodiments, the deaminase or deaminase domain is a cytosine deaminase, catalyzing the hydrolytic deamination of cytosine to uracil. In some embodiments, the deaminase is an adenosine deaminase, which catalyzes the hydrolytic deamination of adenine to hypoxanthine. In some embodiments, the deaminase is an adenosine deaminase, which catalyzes the hydrolytic deamination of adenosine or adenine (A) to inosine (I). In some embodiments, the deaminase or deaminase domain is an adenosine deaminase, catalyzing the hydrolytic deamination of adenosine or deoxyadenosine to inosine or deoxyinosine, respectively. In some embodiments, the adenosine deaminase catalyzes the hydrolytic deamination of adenosine in deoxyribonucleic acid (DNA). The adenosine deaminase (e.g., engineered adenosine deaminase, evolved adenosine deaminase) provided herein can be from any organism, such as a bacterium. In some embodiments, the adenosine deaminase is from a bacterium, such as E. coli, S. aureus, S. typhi, S. putrefaciens, H influenzae, or C. crescentus. In some embodiments, the adenosine deaminase is a TadA deaminase. In some embodiments, the deaminase or deaminase domain is a variant of a naturally occurring deaminase from an organism, such as a human, chimpanzee, gorilla, monkey, cow, dog, rat, or mouse. In some embodiments, the deaminase or deaminase domain does not occur in nature. For example, in some embodiments, the deaminase or deaminase domain is at least 50%, at least 55%, at least 60%, at least 65%, at least 70%, at least 75% at least 80%, at least 85%, at least 90%, at least 91%, at least 92%, at least 93%, at least 94%, at least 95%, at least 96%, at least 97%, at least 98%, at least 99%, at least 99.1%, at least 99.2%, at least 99.3%, at least 99.4%, at least 99.5%, at least 99.6%, at least 99.7%, at least 99.8%, or at least 99.9% identical to a naturally occurring deaminase.

[0140] “Detect” refers to identifying the presence, absence or amount of the analyte to be detected. In one embodiment, a sequence alteration in a polynucleotide or polypeptide is detected. In another embodiment, the presence of indels is detected.

[0141] By “detectable label” is meant a composition that when linked to a molecule of interest renders the latter detectable, via spectroscopic, photochemical, biochemical, immunochemical, or chemical means. For example, useful labels include radioactive isotopes, magnetic beads, metallic beads, colloidal particles, fluorescent dyes, electron-dense reagents, enzymes (for example, as commonly used in an enzyme linked immunosorbent assay (ELISA)), biotin, digoxigenin, or haptens.

[0142] By “disease” is meant any condition or disorder that damages or interferes with the normal function of a cell, tissue, or organ.

[0143] By “effective amount” is meant the amount of an agent or active compound, e.g., a base editor as described herein, that is required to ameliorate the symptoms of a disease relative to an untreated patient or an individual without disease, i.e., a healthy individual, or is the amount of the agent or active compound sufficient to elicit a desired biological response. The effective amount of active compound(s) used to practice the present invention for therapeutic treatment of a disease varies depending upon the manner of administration, the age, body weight, and general health of the subject. Ultimately, the attending physician or veterinarian will decide the appropriate amount and dosage regimen. Such amount is referred to as an “effective” amount. In one embodiment, an effective amount is the amount of a base editor of the invention sufficient to introduce an alteration in a gene of interest in a cell (e.g., a cell in vitro or in vivo). In one embodiment, an effective amount is the amount of a base editor required to achieve a therapeutic effect. Such therapeutic effect need not be sufficient to alter a pathogenic gene in all cells of a subject, tissue or organ, but only to alter the pathogenic gene in about 1%, 5%, 10%, 25%, 50%, 75% or more of the cells present in a subject, tissue or organ. In one embodiment, an effective amount is sufficient to ameliorate one or more symptoms of a disease.

[0144] In some embodiments, an effective amount of a fusion protein provided herein, e.g., of a nucleobase editor comprising a nCas9 domain and a deaminase domain (e.g., adenosine deaminase, cytidine deaminase) refers to the amount that is sufficient to induce editing of a target site specifically bound and edited by the nucleobase editors described herein. As will be appreciated by the skilled artisan, the effective amount of an agent, e.g., a fusion protein, may vary depending on various factors as, for example, on the desired biological response, e.g., on the specific allele, genome, or target site to be edited, on the cell or tissue being targeted, and/or on the agent being used.

[0145] In some embodiments, an effective amount of a fusion protein provided herein, e.g., of a fusion protein comprising a nCas9 domain and a deaminase domain may refer to the amount of the fusion protein that is sufficient to induce editing of a target site specifically bound and edited by the fusion protein. As will be appreciated by the skilled artisan, the effective amount of an agent, e.g., a fusion protein, a nuclease, a hybrid protein, a protein dimer, a complex of a protein (or protein dimer) and a polynucleotide, or a polynucleotide, may vary depending on various factors as, for example, on the desired biological response, e.g., on the specific allele, genome, or target site to be edited, on the cell or tissue being targeted, and/or on the agent being used.

[0146] By “fragment” is meant a portion of a polypeptide or nucleic acid molecule. This portion contains, at least about 10%, 20%, 30%, 40%, 50%, 60%, 70%, 80%, or 90% of the entire length of the reference nucleic acid molecule or polypeptide. A fragment may contain 10, 20, 30, 40, 50, 60, 70, 80, 90, or 100, 200, 300, 400, 500, 600, 700, 800, 900, or 1000 nucleotides or amino acids.

[0147] By “guide RNA” or “gRNA” is meant a polynucleotide that is specific for a target sequence and can form a complex with a polynucleotide programmable nucleotide binding domain protein (e.g., Cas9 or Cpf1). In an embodiment, the guide polynucleotide is a guide RNA (gRNA). gRNAs can exist as a complex of two or more RNAs, or as a single RNA molecule. gRNAs that exist as a single RNA molecule may be referred to as single-guide RNAs (sgRNAs), although “gRNA” is used interchangeably to refer to guide RNAs that exist as either single molecules or as a complex of two or more molecules. Typically, gRNAs that exist as single RNA species comprise two domains: (1) a domain that shares homology to a target nucleic acid (e.g., and directs binding of a Cas9 complex to the target); and (2) a domain that binds a Cas9 protein. In some embodiments, domain (2) corresponds to a sequence known as a tracrRNA, and comprises a stem-loop structure. For example, in some embodiments, domain (2) is identical or homologous to a tracrRNA as provided in Jinek et al., Science 337:816-821(2012), the entire contents of which is incorporated herein by reference. Other examples of gRNAs (e.g., those including domain 2) can be found in US20160208288, entitled “Switchable Cas9 Nucleases and Uses Thereof,” and U.S. Pat. No. 9,737,604, entitled “Delivery System For Functional Nucleases,” the entire contents of each are hereby incorporated by reference in their entirety. In some embodiments, a gRNA comprises two or more of domains (1) and (2), and may be referred to as an “extended gRNA.” An extended gRNA will bind two or more Cas9 proteins and bind a target nucleic acid at two or more distinct regions, as described herein. The gRNA comprises a nucleotide sequence that complements a target site, which mediates binding of the nuclease/RNA complex to the target site, providing the sequence specificity of the nuclease:RNA complex.

[0148] By “heterodimer” is meant a fusion protein comprising two domains, such as a wild type TadA domain and a variant of TadA domain (e.g., TadA*8 or TadA*9) or two variant TadA domains (e.g., TadA*7.10 and TadA*8 or two TadA*8 domains; or TadA*7.10 and TadA*9 or two TadA*9 domains).

[0149] “Hybridization” means hydrogen bonding, which may be Watson-Crick, Hoogsteen or reversed Hoogsteen hydrogen bonding, between complementary nucleobases. For example, adenine and thymine are complementary nucleobases that pair through the formation of hydrogen bonds.

[0150] By “increases” is meant a positive alteration of at least 10%, 25%, 50%, 75%, or 100%.

[0151] The terms “inhibitor of base repair”, “base repair inhibitor”, “IBR” or their grammatical equivalents refer to a protein that is capable in inhibiting the activity of a nucleic acid repair enzyme, for example a base excision repair enzyme. In some embodiments, the IBR is an inhibitor of inosine base excision repair. Exemplary inhibitors of base repair include inhibitors of APE1, Endo III, Endo IV, Endo V, Endo VIII, Fpg, hOGGl, hNEIL1, T7 Endol, T4PDG, UDG, hSMUG1, and hAAG. In some embodiments, the base repair inhibitor is an inhibitor of Endo V or hAAG. In some embodiments, the IBR is an inhibitor of Endo V or hAAG. In some embodiments, the IBR is a catalytically inactive EndoV or a catalytically inactive hAAG. In some embodiments, the base repair inhibitor is a catalytically inactive EndoV or a catalytically inactive hAAG. In some embodiments, the base repair inhibitor is uracil glycosylase inhibitor (UGI). UGI refers to a protein that is capable of inhibiting a uracil-DNA glycosylase base-excision repair enzyme. In some embodiments, a UGI domain comprises a wild-type UGI or a fragment of a wild-type UGI. In some embodiments, the UGI proteins provided herein include fragments of UGI and proteins homologous to a UGI or a UGI fragment. In some embodiments, the base repair inhibitor is an inhibitor of inosine base excision repair. In some embodiments, the base repair inhibitor is a “catalytically inactive inosine specific nuclease” or “dead inosine specific nuclease.” Without wishing to be bound by any particular theory, catalytically inactive inosine glycosylases (e.g., alkyl adenine glycosylase (AAG)) can bind inosine, but cannot create an abasic site or remove the inosine, thereby sterically blocking the newly formed inosine moiety from DNA damage/repair mechanisms. In some embodiments, the catalytically inactive inosine specific nuclease can be capable of binding an inosine in a nucleic acid but does not cleave the nucleic acid. Non-limiting exemplary catalytically inactive inosine specific nucleases include catalytically inactive alkyl adenosine glycosylase (AAG nuclease), for example, from a human, and catalytically inactive endonuclease V (EndoV nuclease), for example, from E. coli. In some embodiments, the catalytically inactive AAG nuclease comprises an E125Q mutation or a corresponding mutation in another AAG nuclease.

[0152] An “intein” is a fragment of a protein that is able to excise itself and join the remaining fragments (the exteins) with a peptide bond in a process known as protein splicing. Inteins are also referred to as “protein introns.” The process of an intein excising itself and joining the remaining portions of the protein is herein termed “protein splicing” or “intein-mediated protein splicing.” In some embodiments, an intein of a precursor protein (an intein containing protein prior to intein-mediated protein splicing) comes from two genes. Such intein is referred to herein as a split intein (e.g., split intein-N and split intein-C). For example, in cyanobacteria, DnaE, the catalytic subunit a of DNA polymerase III, is encoded by two separate genes, dnaE-n and dnaE-c. The intein encoded by the dnaE-n gene may be herein referred as “intein-N.” The intein encoded by the dnaE-c gene may be herein referred as “intein-C.”

[0153] Other intein systems may also be used. For example, a synthetic intein based on the dnaE intein, the Cfa-N (e.g., split intein-N) and Cfa-C (e.g., split intein-C) intein pair, has been described (e.g., in Stevens et al., J Am Chem Soc. 2016 Feb. 24; 138(7):2162-5, incorporated herein by reference). Non-limiting examples of intein pairs that may be used in accordance with the present disclosure include: Cfa DnaE intein, Ssp GyrB intein, Ssp DnaX intein, Ter DnaE3 intein, Ter ThyX intein, Rma DnaB intein and Cne Prp8 intein (e.g., as described in U.S. Pat. No. 8,394,604, incorporated herein by reference. Exemplary nucleotide and amino acid sequences of inteins are provided.

DnaE Intein-N DNA:
TGCCTGTCATACGAAACCGAGATACTGACAGTAGAATATGGCCTTCTGCCAATCGGGAAGAT
TGTGGAGAAACGGATAGAATGCACAGTTTACTCTGTCGATAACAATGGTAACATTTATACTC
AGCCAGTTGCCCAGTGGCACGACCGGGGAGAGCAGGAAGTATTCGAATACTGTCTGGAGGAT
GGAAGTCTCATTAGGGCCACTAAGGACCACAAATTTATGACAGTCGATGGCCAGATGCTGCC
TATAGACGAAATCTTTGAGCGAGAGTTGGACCTCATGCGAGTTGACAACCTTCCTAAT
DnaE Intein-N Protein:
CLSYETEILTVEYGLLPIGKIVEKRIECTVYSVDNNGNIYTQPVAQWHDR
GEQEVFEYCLEDGSLIRATKDHKFMTVDGQMLPIDEIFERELDLMRVDNL PN
DnaE Intein-C DNA:
ATGATCAAGATAGCTACAAGGAAGTATCTTGGCAAACAAAACGTTTATGA
TATTGGAGTCGAAAGAGATCACAACTTTGCTCTGAAGAACGGATTCATAG CTTCTAAT
Intein-C:
MIKIATRKYLGKQNVYDIGVERDHNFALKNGFIASN
Cfa-N DNA:
TGCCTGTCTTATGATACCGAGATACTTACCGTTGAATATGGCTTCTTGCCTATTGGAAAGAT
TGTCGAAGAGAGAATTGAATGCACAGTATATACTGTAGACAAGAATGGTTTCGTTTACACAC
AGCCCATTGCTCAATGGCACAATCGCGGCGAACAAGAAGTATTTGAGTACTGTCTCGAGGAT
GGAAGCATCATACGAGCAACTAAAGATCATAAATTCATGACCACTGACGGGCAGATGTTGCC
AATAGATGAGATATTCGAGCGGGGCTTGGATCTCAAACAAGTGGATGGATTGCCA
Cfa-N Protein:
CLSYDTEILTVEYGFLPIGKIVEERIECTVYTVDKNGFVYTQPIAQWHNRGEQEVFEYCLED
GSIIRATKDHKFMTTDGQMLPIDEIFERGLDLKQVDGLP
Cfa-C DNA:
ATGAAGAGGACTGCCGATGGATCAGAGTTTGAATCTCCCAAGAAGAAGAGGAAAGTAAAGAT
AATATCTCGAAAAAGTCTTGGTACCCAAAATGTCTATGATATTGGAGTGGAGAAAGATCACA
ACTTCCTTCTCAAGAACGGTCTCGTAGCCAGCAAC
Cfa-C Protein:
MKRTADGSEFESPKKKRKVKIISRKSLGTQNVYDIGVEKDHNFLLKNGLVASN

[0154] Intein-N and intein-C may be fused to the N-terminal portion of the split Cas9 and the C-terminal portion of the split Cas9, respectively, for the joining of the N-terminal portion of the split Cas9 and the C-terminal portion of the split Cas9. For example, in some embodiments, an intein-N is fused to the C-terminus of the N-terminal portion of the split Cas9, i.e., to form a structure of N-[N-terminal portion of the split Cas9]-[intein-N]-C. In some embodiments, an intein-C is fused to the N-terminus of the C-terminal portion of the split Cas9, i.e., to form a structure of N-[intein-C]-[C-terminal portion of the split Cas9]-C. The mechanism of intein-mediated protein splicing for joining the proteins the inteins are fused to (e.g., split Cas9) is known in the art, e.g., as described in Shah et al., Chem Sci. 2014; 5(1):446-461, incorporated herein by reference. Methods for designing and using inteins are known in the art and described, for example by WO2014004336, WO2017132580, US20150344549, and US20180127780, each of which is incorporated herein by reference in their entirety.

[0155] The terms “isolated,” “purified,” or “biologically pure” refer to material that is free to varying degrees from components which normally accompany it as found in its native state. “Isolate” denotes a degree of separation from original source or surroundings. “Purify” denotes a degree of separation that is higher than isolation. A “purified” or “biologically pure” protein is sufficiently free of other materials such that any impurities do not materially affect the biological properties of the protein or cause other adverse consequences. That is, a nucleic acid or peptide of this invention is purified if it is substantially free of cellular material, viral material, or culture medium when produced by recombinant DNA techniques, or chemical precursors or other chemicals when chemically synthesized. Purity and homogeneity are typically determined using analytical chemistry techniques, for example, polyacrylamide gel electrophoresis or high performance liquid chromatography. The term “purified” can denote that a nucleic acid or protein gives rise to essentially one band in an electrophoretic gel. For a protein that can be subjected to modifications, for example, phosphorylation or glycosylation, different modifications may give rise to different isolated proteins, which can be separately purified.

[0156] By “isolated polynucleotide” is meant a nucleic acid (e.g., a DNA) that is free of the genes which, in the naturally-occurring genome of the organism from which the nucleic acid molecule of the invention is derived, flank the gene. The term therefore includes, for example, a recombinant DNA that is incorporated into a vector; into an autonomously replicating plasmid or virus; or into the genomic DNA of a prokaryote or eukaryote; or that exists as a separate molecule (for example, a cDNA or a genomic or cDNA fragment produced by PCR or restriction endonuclease digestion) independent of other sequences. In addition, the term includes an RNA molecule that is transcribed from a DNA molecule, as well as a recombinant DNA that is part of a hybrid gene encoding additional polypeptide sequence.

[0157] By an “isolated polypeptide” is meant a polypeptide of the invention that has been separated from components that naturally accompany it. Typically, the polypeptide is isolated when it is at least 60%, by weight, free from the proteins and naturally-occurring organic molecules with which it is naturally associated. Preferably, the preparation is at least 75%, more preferably at least 90%, and most preferably at least 99%, by weight, a polypeptide of the invention. An isolated polypeptide of the invention may be obtained, for example, by extraction from a natural source, by expression of a recombinant nucleic acid encoding such a polypeptide; or by chemically synthesizing the protein. Purity can be measured by any appropriate method, for example, column chromatography, polyacrylamide gel electrophoresis, or by HPLC analysis.

[0158] The term “linker”, as used herein, can refer to a covalent linker (e.g., covalent bond), a non-covalent linker, a chemical group, or a molecule linking two molecules or moieties, e.g., two components of a protein complex or a ribonucleocomplex, or two domains of a fusion protein, such as, for example, a polynucleotide programmable DNA binding domain (e.g., dCas9) and a deaminase domain ((e.g., an adenosine deaminase, a cytidine deaminase, or an adenosine deaminase and a cytidine deaminase). A linker can join different components of, or different portions of components of, a base editor system. For example, in some embodiments, a linker can join a guide polynucleotide binding domain of a polynucleotide programmable nucleotide binding domain and a catalytic domain of a deaminase. In some embodiments, a linker can join a CRISPR polypeptide and a deaminase. In some embodiments, a linker can join a Cas9 and a deaminase. In some embodiments, a linker can join a dCas9 and a deaminase. In some embodiments, a linker can join a nCas9 and a deaminase. In some embodiments, a linker can join a guide polynucleotide and a deaminase. In some embodiments, a linker can join a deaminating component and a polynucleotide programmable nucleotide binding component of a base editor system. In some embodiments, a linker can join a RNA-binding portion of a deaminating component and a polynucleotide programmable nucleotide binding component of a base editor system. In some embodiments, a linker can join a RNA-binding portion of a deaminating component and a RNA-binding portion of a polynucleotide programmable nucleotide binding component of a base editor system. A linker can be positioned between, or flanked by, two groups, molecules, or other moieties and connected to each one via a covalent bond or non-covalent interaction, thus connecting the two. In some embodiments, the linker can be an organic molecule, group, polymer, or chemical moiety. In some embodiments, the linker can be a polynucleotide. In some embodiments, the linker can be a DNA linker. In some embodiments, the linker can be a RNA linker. In some embodiments, a linker can comprise an aptamer capable of binding to a ligand. In some embodiments, the ligand may be carbohydrate, a peptide, a protein, or a nucleic acid. In some embodiments, the linker may comprise an aptamer may be derived from a riboswitch. The riboswitch from which the aptamer is derived may be selected from a theophylline riboswitch, a thiamine pyrophosphate (TPP) riboswitch, an adenosine cobalamin (AdoCbl) riboswitch, an S-adenosyl methionine (SAM) riboswitch, an SAH riboswitch, a flavin mononucleotide (FMN) riboswitch, a tetrahydrofolate riboswitch, a lysine riboswitch, a glycine riboswitch, a purine riboswitch, a GlmS riboswitch, or a pre-queosine1 (PreQ1) riboswitch. In some embodiments, a linker may comprise an aptamer bound to a polypeptide or a protein domain, such as a polypeptide ligand. In some embodiments, the polypeptide ligand may be a K Homology (KH) domain, a MS2 coat protein domain, a PP7 coat protein domain, a SfMu Com coat protein domain, a sterile alpha motif, a telomerase Ku binding motif and Ku protein, a telomerase Sm7 binding motif and Sm7 protein, or a RNA recognition motif. In some embodiments, the polypeptide ligand may be a portion of a base editor system component. For example, a nucleobase editing component may comprise a deaminase domain and a RNA recognition motif.

[0159] In some embodiments, the linker can be an amino acid or a plurality of amino acids (e.g., a peptide or protein). In some embodiments, the linker can be about 5-100 amino acids in length, for example, about 5, 6, 7, 8, 9, 10, 11, 12, 13, 14, 15, 16, 17, 18, 19, 20, 20-30, 30-40, 40-50, 50-60, 60-70, 70-80, 80-90, or 90-100 amino acids in length. In some embodiments, the linker can be about 100-150, 150-200, 200-250, 250-300, 300-350, 350-400, 400-450, or 450-500 amino acids in length. Longer or shorter linkers can also be used. Longer or shorter linkers are also contemplated. In some embodiments, a linker comprises the amino acid sequence SGSETPGTSESATPES, which may also be referred to as the XTEN linker. In some embodiments, a linker comprises the amino acid sequence SGGS. In some embodiments, a linker comprises (SGGS)ₙ, (GGGS)ₙ, (GGGGS)ₙ, (G)ₙ, (EAAAK)ₙ, (GGS)ₙ, SGSETPGTSESATPES, or (XP)ₙ motif, or a combination of any of these, where n is independently an integer between 1 and 30, and where X is any amino acid. In some embodiments, n is 1, 2, 3, 4, 5, 6, 7, 8, 9, 10, 11, 12, 13, 14, or 15. In some embodiments, a linker comprises a plurality of proline residues and is 5-21, 5-14, 5-9, 5-7 amino acids in length, e.g., PAPAP, PAPAPA, PAPAPAP, PAPAPAPA, P(AP)₄, P(AP)₇, P(AP)₁₀. Such proline-rich linkers are also termed “rigid” linkers.

[0160] In some embodiments, a linker joins a gRNA binding domain of an RNA-programmable nuclease, including a Cas9 nuclease domain, and the catalytic domain of a nucleic-acid editing protein (e.g., cytidine or adenosine deaminase). In some embodiments, a linker joins a dCas9 and a nucleic-acid editing protein. For example, the linker is positioned between, or flanked by, two groups, molecules, or other moieties and connected to each one via a covalent bond, thus connecting the two. In some embodiments, the linker is an amino acid or a plurality of amino acids (e.g., a peptide or protein). In some embodiments, the linker is an organic molecule, group, polymer, or chemical moiety. In some embodiments, the linker is 5-200 amino acids in length, for example, 5, 6, 7, 8, 9, 10, 11, 12, 13, 14, 15, 16, 17, 18, 19, 20, 25, 35, 45, 50, 55, 60, 60, 65, 70, 70, 75, 80, 85, 90, 90, 95, 100, 101, 102, 103, 104, 105, 110, 120, 130, 140, 150, 160, 175, 180, 190, or 200 amino acids in length.

[0161] In some embodiments, the domains of a base editor are fused via a linker that comprises the amino acid sequence of SGGSSGSETPGTSESATPESSGGS, SGGSSGGSSGSETPGTSESATPESSGGSSGGS, or GGSGGSPGSPAGSPTSTEEGTSESATPESGPGTSTEPSEGSAPGSPAGSPTSTEEGTSTE PSEGSAPGTSTEPSEGSAPGTSESATPESGPGSEPATSGGSGGS. In some embodiments, domains of the base editor are fused via a linker comprising the amino acid sequence SGSETPGTSESATPES, which may also be referred to as the XTEN linker. In some embodiments, the linker is 24 amino acids in length. In some embodiments, the linker comprises the amino acid sequence SGGSSGGSSGSETPGTSESATPES. In some embodiments, the linker is 40 amino acids in length. In some embodiments, the linker comprises the amino acid sequence SGGSSGGSSGSETPGTSESATPESSGGSSGGSSGGSSGGS. In some embodiments, the linker is 64 amino acids in length. In some embodiments, the linker comprises the amino acid sequence SGGSSGGSSGSETPGTSESATPESSGGSSGGSSGGSSGGSSGSETPGTSESATPESSGGS SGGS. In some embodiments, the linker is 92 amino acids in length. In some embodiments, the linker comprises the amino acid sequence

PGSPAGSPTSTEEGTSESATPESGPGTSTEPSEGSAPGSPAGSPTSTEE
GTSTEPSEGSAPGTSTEPSEGSAPGTSESATPESGPGSEPATS.

[0162] By “marker” is meant any protein or polynucleotide having an alteration in expression level or activity that is associated with a disease or disorder.

[0163] The term “mutation,” as used herein, refers to a substitution of a residue within a sequence, e.g., a nucleic acid or amino acid sequence, with another residue, or a deletion or insertion of one or more residues within a sequence. Mutations are typically described herein by identifying the original residue followed by the position of the residue within the sequence and by the identity of the newly substituted residue. Various methods for making the amino acid substitutions (mutations) provided herein are well known in the art, and are provided by, for example, Green and Sambrook, Molecular Cloning: A Laboratory Manual (4th ed., Cold Spring Harbor Laboratory Press, Cold Spring Harbor, N.Y. (2012)). In some embodiments, the presently disclosed base editors can efficiently generate an “intended mutation”, such as a point mutation, in a nucleic acid (e.g., a nucleic acid within a genome of a subject) without generating a significant number of unintended mutations, such as unintended point mutations. In some embodiments, an intended mutation is a mutation that is generated by a specific base editor (e.g., cytidine base editor or adenosine base editor) bound to a guide polynucleotide (e.g., gRNA), specifically designed to generate the intended mutation.

[0164] In general, mutations made or identified in a sequence (e.g., an amino acid sequence as described herein) are numbered in relation to a reference (or wild type) sequence, i.e., a sequence that does not contain the mutations. The skilled practitioner in the art would readily understand how to determine the position of mutations in amino acid and nucleic acid sequences relative to a reference sequence.

[0165] The term “non-conservative mutations” involve amino acid substitutions between different groups, for example, lysine for tryptophan, or phenylalanine for serine, etc. In this case, it is preferable for the non-conservative amino acid substitution to not interfere with, or inhibit the biological activity of, the functional variant. The non-conservative amino acid substitution can enhance the biological activity of the functional variant, such that the biological activity of the functional variant is increased as compared to the wild-type protein. The term “nuclear localization sequence,” “nuclear localization signal,” or “NLS” refers to an amino acid sequence that promotes import of a protein into the cell nucleus. Nuclear localization sequences are known in the art and described, for example, in Plank et al., International PCT application, PCT/EP2000/011690, filed Nov. 23, 2000, published as WO/2001/038547 on May 31, 2001, the contents of which are incorporated herein by reference for their disclosure of exemplary nuclear localization sequences. In other embodiments, the NLS is an optimized NLS described, for example, by Koblan et al., Nature Biotech. 2018 doi:10.1038/nbt.4172. In some embodiments, an NLS comprises the amino acid sequence KRTADGSEFESPKKKRKV, KRPAATKKAGQAKKKK, KKTELQTTNAENKTKKL, KRGINDRNFWRGENGRKTR, RKSGKIAAIVVKRPRK, PKKKRKV, or MDSLLMNRRKFLYQFKNVRWAKGRRETYLC.

[0166] The term “nucleobase,” “nitrogenous base,” or “base,” used interchangeably herein, refers to a nitrogen-containing biological compound that forms a nucleoside, which in turn is a component of a nucleotide. The ability of nucleobases to form base pairs and to stack one upon another leads directly to long-chain helical structures such as ribonucleic acid (RNA) and deoxyribonucleic acid (DNA). Five nucleobases—adenine (A), cytosine (C), guanine (G), thymine (T), and uracil (U)— are called primary or canonical. Adenine and guanine are derived from purine, and cytosine, uracil, and thymine are derived from pyrimidine. DNA and RNA can also contain other (non-primary) bases that are modified. Non-limiting exemplary modified nucleobases can include hypoxanthine, xanthine, 7-methylguanine, 5,6-dihydrouracil, 5-methylcytosine (m5C), and 5-hydromethylcytosine. Hypoxanthine and xanthine can be created through mutagen presence, both of them through deamination (replacement of the amine group with a carbonyl group). Hypoxanthine can be modified from adenine. Xanthine can be modified from guanine. Uracil can result from deamination of cytosine. A “nucleoside” consists of a nucleobase and a five carbon sugar (either ribose or deoxyribose). Examples of a nucleoside include adenosine, guanosine, uridine, cytidine, 5-methyluridine (m5U), deoxyadenosine, deoxyguanosine, thymidine, deoxyuridine, and deoxycytidine. Examples of a nucleoside with a modified nucleobase includes inosine (I), xanthosine (X), 7-methylguanosine (m7G), dihydrouridine (D), 5-methylcytidine (m5C), and pseudouridine (ψ). A “nucleotide” consists of a nucleobase, a five carbon sugar (either ribose or deoxyribose), and at least one phosphate group.

[0167] The terms “nucleic acid” and “nucleic acid molecule,” as used herein, refer to a compound comprising a nucleobase and an acidic moiety, e.g., a nucleoside, a nucleotide, or a polymer of nucleotides. Typically, polymeric nucleic acids, e.g., nucleic acid molecules comprising three or more nucleotides are linear molecules, in which adjacent nucleotides are linked to each other via a phosphodiester linkage. In some embodiments, “nucleic acid” refers to individual nucleic acid residues (e.g. nucleotides and/or nucleosides). In some embodiments, “nucleic acid” refers to an oligonucleotide chain comprising three or more individual nucleotide residues. As used herein, the terms “oligonucleotide” and “polynucleotide” can be used interchangeably to refer to a polymer of nucleotides (e.g., a string of at least three nucleotides). In some embodiments, “nucleic acid” encompasses RNA as well as single and/or double-stranded DNA. Nucleic acids may be naturally occurring, for example, in the context of a genome, a transcript, an mRNA, tRNA, rRNA, siRNA, snRNA, a plasmid, cosmid, chromosome, chromatid, or other naturally occurring nucleic acid molecule. On the other hand, a nucleic acid molecule may be a non-naturally occurring molecule, e.g., a recombinant DNA or RNA, an artificial chromosome, an engineered genome, or fragment thereof, or a synthetic DNA, RNA, DNA/RNA hybrid, or including non-naturally occurring nucleotides or nucleosides. Furthermore, the terms “nucleic acid,” “DNA,” “RNA,” and/or similar terms include nucleic acid analogs, e.g., analogs having other than a phosphodiester backbone. Nucleic acids can be purified from natural sources, produced using recombinant expression systems and optionally purified, chemically synthesized, etc. Where appropriate, e.g., in the case of chemically synthesized molecules, nucleic acids can comprise nucleoside analogs such as analogs having chemically modified bases or sugars, and backbone modifications. A nucleic acid sequence is presented in the 5′ to 3′ direction unless otherwise indicated. In some embodiments, a nucleic acid is or comprises natural nucleosides (e.g. adenosine, thymidine, guanosine, cytidine, uridine, deoxyadenosine, deoxythymidine, deoxyguanosine, and deoxycytidine); nucleoside analogs (e.g., 2-aminoadenosine, 2-thiothymidine, inosine, pyrrolo-pyrimidine, 3-methyl adenosine, 5-methylcytidine, 2-aminoadenosine, C5-bromouridine, C5-fluorouridine, C5-iodouridine, C5-propynyl-uridine, C5-propynyl-cytidine, C5-methylcytidine, 2-aminoadenosine, 7-deazaadenosine, 7-deazaguanosine, 8-oxoadenosine, 8-oxoguanosine, 0(6)-methylguanine, and 2-thiocytidine); chemically modified bases; biologically modified bases (e.g., methylated bases); intercalated bases; modified sugars (2′—e.g., fluororibose, ribose, 2′-deoxyribose, arabinose, and hexose); and/or modified phosphate groups (e.g., phosphorothioates and 5′-N-phosphoramidite linkages).

[0168] The term “nucleic acid programmable DNA binding protein” or “napDNAbp” may be used interchangeably with “polynucleotide programmable nucleotide binding domain” to refer to a protein that associates with a nucleic acid (e.g., DNA or RNA), such as a guide nucleic acid or guide polynucleotide (e.g., gRNA), that guides the napDNAbp to a specific nucleic acid sequence. In some embodiments, the polynucleotide programmable nucleotide binding domain is a polynucleotide programmable DNA binding domain. In some embodiments, the polynucleotide programmable nucleotide binding domain is a polynucleotide programmable RNA binding domain. In some embodiments, the polynucleotide programmable nucleotide binding domain is a Cas9 protein. A Cas9 protein can associate with a guide RNA that guides the Cas9 protein to a specific DNA sequence that is complementary to the guide RNA. In some embodiments, the napDNAbp is a Cas9 domain, for example a nuclease active Cas9, a Cas9 nickase (nCas9), or a nuclease inactive Cas9 (dCas9). Non-limiting examples of nucleic acid programmable DNA binding proteins include, Cas9 (e.g., dCas9 and nCas9), Cas12a/Cpf1, Cas12b/C2c1, Cas12c/C2c3, Cas12d/CasY, Cas12e/CasX, Cas12g, Cas12h, Cas12i, and Cas12j/CasΦ. Non-limiting examples of Cas enzymes include Cas1, Cas1B, Cas2, Cas3, Cas4, Cas5, Cas5d, Cas5t, Cas5h, Cas5a, Cas6, Cas7, Cas8, Cas8a, Cas8b, Cas8c, Cas9 (also known as Csn1 or Csx12), Cas10, Cas10d, Cas12a/Cpf1, Cas12b/C2c1, Cas12c/C2c3, Cas12d/CasY, Cas12e/CasX, Cas12g, Cas12h, Cas12i, Cas12j/CasΦ, Csy1, Csy2, Csy3, Csy4, Cse1, Cse2, Cse3, Cse4, Cse5e, Csc1, Csc2, Csa5, Csn1, Csn2, Csm1, Csm2, Csm3, Csm4, Csm5, Csm6, Cmr1, Cmr3, Cmr4, Cmr5, Cmr6, Csb1, Csb2, Csb3, Csx17, Csx14, Csx10, Csx16, CsaX, Csx3, Csx1, Csx1S, Csx11, Csf1, Csf2, CsO, Csf4, Csd1, Csd2, Cst1, Cst2, Csh1, Csh2, Csa1, Csa2, Csa3, Csa4, Csa5, Type II Cas effector proteins, Type V Cas effector proteins, Type VI Cas effector proteins, CARF, DinG, homologues thereof, or modified or engineered versions thereof. Other nucleic acid programmable DNA binding proteins are also within the scope of this disclosure, although they may not be specifically listed in this disclosure. See, e.g., Makarova et al. “Classification and Nomenclature of CRISPR-Cas Systems: Where from Here?” CRISPR J. 2018 October; 1:325-336. doi: 10.1089/crispr.2018.0033; Yan et al., “Functionally diverse type V CRISPR-Cas systems” Science. 2019 Jan. 4; 363(6422):88-91. doi: 10.1126/science.aav7271, the entire contents of each are hereby incorporated by reference.

[0169] The terms “nucleobase editing domain” or “nucleobase editing protein,” as used herein, refers to a protein or enzyme that can catalyze a nucleobase modification in RNA or DNA, such as cytosine (or cytidine) to uracil (or uridine) or thymine (or thymidine), and adenine (or adenosine) to hypoxanthine (or inosine) deaminations, as well as non-templated nucleotide additions and insertions. In some embodiments, the nucleobase editing domain is a deaminase domain (e.g., an adenine deaminase or an adenosine deaminase; or a cytidine deaminase or a cytosine deaminase). In some embodiments, the nucleobase editing domain is more than one deaminase domain (e.g., an adenine deaminase or an adenosine deaminase and a cytidine or a cytosine deaminase). In some embodiments, the nucleobase editing domain can be a naturally occurring nucleobase editing domain. In some embodiments, the nucleobase editing domain can be an engineered or evolved nucleobase editing domain from the naturally occurring nucleobase editing domain. The nucleobase editing domain can be from any organism, such as a bacterium, human, chimpanzee, gorilla, monkey, cow, dog, rat, or mouse.

[0170] As used herein, “obtaining” as in “obtaining an agent” includes synthesizing, purchasing, or otherwise acquiring the agent.

[0171] A “patient” or “subject” as used herein refers to a mammalian subject or individual diagnosed with, at risk of having or developing, or suspected of having or developing a disease or a disorder. In some embodiments, the term “patient” refers to a mammalian subject with a higher than average likelihood of developing a disease or a disorder. Exemplary patients can be humans, non-human primates, cats, dogs, pigs, cattle, cats, horses, camels, llamas, goats, sheep, rodents (e.g., mice, rabbits, rats, or guinea pigs) and other mammalians that can benefit from the therapies disclosed herein. Exemplary human patients can be male and/or female.

[0172] “Patient in need thereof” or “subject in need thereof” is referred to herein as a patient diagnosed with, at risk or having, predetermined to have, or suspected of having a disease or disorder.

[0173] The terms “pathogenic mutation”, “pathogenic variant”, “disease casing mutation”, “disease causing variant”, “deleterious mutation”, or “predisposing mutation” refers to a genetic alteration or mutation that increases an individual's susceptibility or predisposition to a certain disease or disorder. In some embodiments, the pathogenic mutation comprises at least one wild-type amino acid substituted by at least one pathogenic amino acid in a protein encoded by a gene.

[0174] The terms “protein”, “peptide”, “polypeptide”, and their grammatical equivalents are used interchangeably herein, and refer to a polymer of amino acid residues linked together by peptide (amide) bonds. The terms refer to a protein, peptide, or polypeptide of any size, structure, or function. Typically, a protein, peptide, or polypeptide will be at least three amino acids long. A protein, peptide, or polypeptide can refer to an individual protein or a collection of proteins. One or more of the amino acids in a protein, peptide, or polypeptide can be modified, for example, by the addition of a chemical entity such as a carbohydrate group, a hydroxyl group, a phosphate group, a farnesyl group, an isofarnesyl group, a fatty acid group, a linker for conjugation, functionalization, or other modifications, etc. A protein, peptide, or polypeptide can also be a single molecule or can be a multi-molecular complex. A protein, peptide, or polypeptide can be just a fragment of a naturally occurring protein or peptide. A protein, peptide, or polypeptide can be naturally occurring, recombinant, or synthetic, or any combination thereof. The term “fusion protein” as used herein refers to a hybrid polypeptide which comprises protein domains from at least two different proteins. One protein can be located at the amino-terminal (N-terminal) portion of the fusion protein or at the carboxy-terminal (C-terminal) protein thus forming an amino-terminal fusion protein or a carboxy-terminal fusion protein, respectively. A protein can comprise different domains, for example, a nucleic acid binding domain (e.g., the gRNA binding domain of Cas9 that directs the binding of the protein to a target site) and a nucleic acid cleavage domain, or a catalytic domain of a nucleic acid editing protein. In some embodiments, a protein comprises a proteinaceous part, e.g., an amino acid sequence constituting a nucleic acid binding domain, and an organic compound, e.g., a compound that can act as a nucleic acid cleavage agent. In some embodiments, a protein is in a complex with, or is in association with, a nucleic acid, e.g., RNA or DNA. Any of the proteins provided herein can be produced by any method known in the art. For example, the proteins provided herein can be produced via recombinant protein expression and purification, which is especially suited for fusion proteins comprising a peptide linker. Methods for recombinant protein expression and purification are well known, and include those described by Green and Sambrook, Molecular Cloning: A Laboratory Manual (4th ed., Cold Spring Harbor Laboratory Press, Cold Spring Harbor, N.Y. (2012)), the entire contents of which are incorporated herein by reference.

[0175] Polypeptides and proteins disclosed herein (including functional portions and functional variants thereof) can comprise synthetic amino acids in place of one or more naturally-occurring amino acids. Such synthetic amino acids are known in the art, and include, for example, aminocyclohexane carboxylic acid, norleucine, α-amino n-decanoic acid, homoserine, S-acetylaminomethyl-cysteine, trans-3- and trans-4-hydroxyproline, 4-aminophenylalanine, 4-nitrophenylalanine, 4-chlorophenylalanine, 4-carboxyphenylalanine, β-phenylserine β-hydroxyphenylalanine, phenylglycine, α-naphthylalanine, cyclohexylalanine, cyclohexylglycine, indoline-2-carboxylic acid, 1,2,3,4-tetrahydroisoquinoline-3-carboxylic acid, aminomalonic acid, aminomalonic acid monoamide, N′-benzyl-N′-methyl-lysine, N′,N′-dibenzyl-lysine, 6-hydroxylysine, ornithine, α-aminocyclopentane carboxylic acid, α-aminocyclohexane carboxylic acid, α-aminocycloheptane carboxylic acid, α-(2-amino-2-norbornane)-carboxylic acid, α,γ-diaminobutyric acid, α,β-diaminopropionic acid, homophenylalanine, and α-tert-butylglycine. The polypeptides and proteins can be associated with post-translational modifications of one or more amino acids of the polypeptide constructs. Non-limiting examples of post-translational modifications include phosphorylation, acylation including acetylation and formylation, glycosylation (including N-linked and O-linked), amidation, hydroxylation, alkylation including methylation and ethylation, ubiquitylation, addition of pyrrolidone carboxylic acid, formation of disulfide bridges, sulfation, myristoylation, palmitoylation, isoprenylation, farnesylation, geranylation, glypiation, lipoylation and iodination.

[0176] The term “recombinant” as used herein in the context of proteins or nucleic acids refers to proteins or nucleic acids that do not occur in nature, but are the product of human engineering. For example, in some embodiments, a recombinant protein or nucleic acid molecule comprises an amino acid or nucleotide sequence that comprises at least one, at least two, at least three, at least four, at least five, at least six, or at least seven mutations as compared to any naturally occurring sequence.

[0177] By “reduces” is meant a negative alteration of at least 10%, 25%, 50%, 75%, or 100%.

[0178] By “reference” is meant a standard or control condition. In one embodiment, the reference is a wild-type or healthy cell. In other embodiments and without limitation, a reference is an untreated cell that is not subjected to a test condition, or is subjected to placebo or normal saline, medium, buffer, and/or a control vector that does not harbor a polynucleotide of interest.

[0179] A “reference sequence” is a defined sequence used as a basis for sequence comparison. A reference sequence may be a subset of or the entirety of a specified sequence; for example, a segment of a full-length cDNA or gene sequence, or the complete cDNA or gene sequence. For polypeptides, the length of the reference polypeptide sequence will generally be at least about 16 amino acids, at least about 20 amino acids, at least about 25 amino acids, about 35 amino acids, about 50 amino acids, or about 100 amino acids. For nucleic acids, the length of the reference nucleic acid sequence will generally be at least about 50 nucleotides, at least about 60 nucleotides, at least about 75 nucleotides, about 100 nucleotides or about 300 nucleotides or any integer thereabout or therebetween. In some embodiments, a reference sequence is a wild-type sequence of a protein of interest. In other embodiments, a reference sequence is a polynucleotide sequence encoding a wild-type protein.

[0180] The term “RNA-programmable nuclease,” and “RNA-guided nuclease” are used with (e.g., binds or associates with) one or more RNA(s) that is not a target for cleavage. In some embodiments, an RNA-programmable nuclease, when in a complex with an RNA, may be referred to as a nuclease:RNA complex. Typically, the bound RNA(s) is referred to as a guide RNA (gRNA). In some embodiments, the RNA-programmable nuclease is the (CRISPR-associated system) Cas9 endonuclease, for example, Cas9 (Csn1) from Streptococcus pyogenes (See, e.g., “Complete genome sequence of an Ml strain of Streptococcus pyogenes.” Ferretti J. J. et al., Proc. Natl. Acad. Sci. U.S.A. 98:4658-4663(2001); “CRISPR RNA maturation by trans-encoded small RNA and host factor RNase III.” Deltcheva E., et al., Nature 471:602-607(2011).

[0181] Because RNA-programmable nucleases (e.g., Cas9) use RNA:DNA hybridization to target DNA cleavage sites, these proteins are able to be targeted, in principle, to any sequence specified by the guide RNA. Methods of using RNA-programmable nucleases, such as Cas9, for site-specific cleavage (e.g., to modify a genome) are known in the art (see e.g., Cong, L. et al., Multiplex genome engineering using CRISPR/Cas systems. Science 339, 819-823 (2013); Mali, P. et al., RNA-guided human genome engineering via Cas9. Science 339, 823-826 (2013); Hwang, W. Y. et al., Efficient genome editing in zebrafish using a CRISPR-Cas system. Nature biotechnology 31, 227-229 (2013); Jinek, M. et al., RNA-programmed genome editing in human cells. eLife 2, e00471 (2013); Dicarlo, J. E. et al., Genome engineering in Saccharomyces cerevisiae using CRISPR-Cas systems. Nucleic acids research (2013); Jiang, W. et al. RNA-guided editing of bacterial genomes using CRISPR-Cas systems. Nature biotechnology 31, 233-239 (2013); the entire contents of each of which are incorporated herein by reference).

[0182] The term “single nucleotide polymorphism (SNP)” is a variation in a single nucleotide that occurs at a specific position in the genome, where each variation is present to some appreciable degree within a population (e.g., >1%). For example, at a specific base position in the human genome, the C nucleotide can appear in most individuals, but in a minority of individuals, the position is occupied by an A. This means that there is a SNP at this specific position, and the two possible nucleotide variations, C or A, are said to be alleles for this position. SNPs underlie differences in susceptibility to disease. The severity of illness and the way our body responds to treatments are also manifestations of genetic variations. SNPs can fall within coding regions of genes, non-coding regions of genes, or in the intergenic regions (regions between genes). In some embodiments, SNPs within a coding sequence do not necessarily change the amino acid sequence of the protein that is produced, due to degeneracy of the genetic code. SNPs in the coding region are of two types: synonymous and nonsynonymous SNPs. Synonymous SNPs do not affect the protein sequence, while nonsynonymous SNPs change the amino acid sequence of protein. The nonsynonymous SNPs are of two types: missense and nonsense. SNPs that are not in protein-coding regions can still affect gene splicing, transcription factor binding, messenger RNA degradation, or the sequence of noncoding RNA. Gene expression affected by this type of SNP is referred to as an eSNP (expression SNP) and can be upstream or downstream from the gene. A single nucleotide variant (SNV) is a variation in a single nucleotide without any limitations of frequency and can arise in somatic cells. A somatic single nucleotide variation can also be called a single-nucleotide alteration.

[0183] By “specifically binds” is meant a nucleic acid molecule, polypeptide, or complex thereof (e.g., a nucleic acid programmable DNA binding domain and guide nucleic acid), compound, or molecule that recognizes and binds a polypeptide and/or nucleic acid molecule of the invention, but which does not substantially recognize and bind other molecules in a sample, for example, a biological sample.

[0184] Nucleic acid molecules useful in the methods of the invention include any nucleic acid molecule that encodes a polypeptide of the invention or a fragment thereof. Such nucleic acid molecules need not be 100% identical with an endogenous nucleic acid sequence, but will typically exhibit substantial identity. Polynucleotides having “substantial identity” to an endogenous sequence are typically capable of hybridizing with at least one strand of a double-stranded nucleic acid molecule. Nucleic acid molecules useful in the methods of the invention include any nucleic acid molecule that encodes a polypeptide of the invention or a fragment thereof. Such nucleic acid molecules need not be 100% identical with an endogenous nucleic acid sequence, but will typically exhibit substantial identity. Polynucleotides having “substantial identity” to an endogenous sequence are typically capable of hybridizing with at least one strand of a double-stranded nucleic acid molecule.

[0185] By “hybridize” is meant pair to form a double-stranded molecule between complementary polynucleotide sequences (e.g., a gene described herein), or portions thereof, under various conditions of stringency. (See, e.g., Wahl, G. M. and S. L. Berger (1987) Methods Enzymol. 152:399; Kimmel, A. R. (1987) Methods Enzymol. 152:507).

[0186] For example, stringent salt concentration will ordinarily be less than about 750 mM NaCl and 75 mM trisodium citrate, preferably less than about 500 mM NaCl and 50 mM trisodium citrate, and more preferably less than about 250 mM NaCl and 25 mM trisodium citrate. Low stringency hybridization can be obtained in the absence of organic solvent, e.g., formamide, while high stringency hybridization can be obtained in the presence of at least about 35% formamide, and more preferably at least about 50% formamide. Stringent temperature conditions will ordinarily include temperatures of at least about 30° C., more preferably of at least about 37° C., and most preferably of at least about 42° C. Varying additional parameters, such as hybridization time, the concentration of detergent, e.g., sodium dodecyl sulfate (SDS), and the inclusion or exclusion of carrier DNA, are well known to those skilled in the art. Various levels of stringency are accomplished by combining these various conditions as needed. In a preferred: embodiment, hybridization will occur at 30° C. in 750 mM NaCl, 75 mM trisodium citrate, and 1% SDS. In a more preferred embodiment, hybridization will occur at 37° C. in 500 mM NaCl, 50 mM trisodium citrate, 1% SDS, 35% formamide, and 100 μg/ml denatured salmon sperm DNA (ssDNA). In a most preferred embodiment, hybridization will occur at 42° C. in 250 mM NaCl, 25 mM trisodium citrate, 1% SDS, 50% formamide, and 200 μg/ml ssDNA. Useful variations on these conditions will be readily apparent to those skilled in the art.

[0187] For most applications, washing steps that follow hybridization will also vary in stringency. Wash stringency conditions can be defined by salt concentration and by temperature. As above, wash stringency can be increased by decreasing salt concentration or by increasing temperature. For example, stringent salt concentration for the wash steps will preferably be less than about 30 mM NaCl and 3 mM trisodium citrate, and most preferably less than about 15 mM NaCl and 1.5 mM trisodium citrate. Stringent temperature conditions for the wash steps will ordinarily include a temperature of at least about 25° C., more preferably of at least about 42° C., and even more preferably of at least about 68° C. In an embodiment, wash steps will occur at 25° C. in 30 mM NaCl, 3 mM trisodium citrate, and 0.1% SDS. In another embodiment, wash steps will occur at 42 C in 15 mM NaCl, 1.5 mM trisodium citrate, and 0.1% SDS. In a more preferred embodiment, wash steps will occur at 68° C. in 15 mM NaCl, 1.5 mM trisodium citrate, and 0.1% SDS. Additional variations on these conditions will be readily apparent to those skilled in the art. Hybridization techniques are well known to those skilled in the art and are described, for example, in Benton and Davis (Science 196:180, 1977); Grunstein and Hogness (Proc. Natl. Acad. Sci., USA 72:3961, 1975); Ausubel et al. (Current Protocols in Molecular Biology, Wiley Interscience, New York, 2001); Berger and Kimmel (Guide to Molecular Cloning Techniques, 1987, Academic Press, New York); and Sambrook et al., Molecular Cloning: A Laboratory Manual, Cold Spring Harbor Laboratory Press, New York.

[0188] By “split” is meant divided into two or more fragments.

[0189] A “split Cas9 protein” or “split Cas9” refers to a Cas9 protein that is provided as an N-terminal fragment and a C-terminal fragment encoded by two separate nucleotide sequences. The polypeptides corresponding to the N-terminal portion and the C-terminal portion of the Cas9 protein may be spliced to form a “reconstituted” Cas9 protein. In particular embodiments, the Cas9 protein is divided into two fragments within a disordered region of the protein, e.g., as described in Nishimasu et al., Cell, Volume 156, Issue 5, pp. 935-949, 2014, or as described in Jiang et al. (2016) Science 351: 867-871. PDB file: 5F9R, each of which is incorporated herein by reference. In some embodiments, the protein is divided into two fragments at any C, T, A, or S within a region of SpCas9 between about amino acids A292-G364, F445-K483, or E565-T637, or at corresponding positions in any other Cas9, Cas9 variant (e.g., nCas9, dCas9), or other napDNAbp. In some embodiments, protein is divided into two fragments at SpCas9 T310, T313, A456, 5469, or C574. In some embodiments, the process of dividing the protein into two fragments is referred to as “splitting” the protein.

[0190] In other embodiments, the N-terminal portion of the Cas9 protein comprises amino acids 1-573 or 1-637 S. pyogenes Cas9 wild-type (SpCas9) (NCBI Reference Sequence: NC_002737.2, Uniprot Reference Sequence: Q99ZW2) and the C-terminal portion of the Cas9 protein comprises a portion of amino acids 574-1368 or 638-1368 of SpCas9 wild-type.

[0191] The C-terminal portion of the split Cas9 can be joined with the N-terminal portion of the split Cas9 to form a complete Cas9 protein. In some embodiments, the C-terminal portion of the Cas9 protein starts from where the N-terminal portion of the Cas9 protein ends. As such, in some embodiments, the C-terminal portion of the split Cas9 comprises a portion of amino acids (551-651)-1368 of spCas9. “(551-651)-1368” means starting at an amino acid between amino acids 551-651 (inclusive) and ending at amino acid 1368. For example, the C-terminal portion of the split Cas9 may comprise a portion of any one of amino acid 551-1368, 552-1368, 553-1368, 554-1368, 555-1368, 556-1368, 557-1368, 558-1368, 559-1368, 560-1368, 561-1368, 562-1368, 563-1368, 564-1368, 565-1368, 566-1368, 567-1368, 568-1368, 569-1368, 570-1368, 571-1368, 572-1368, 573-1368, 574-1368, 575-1368, 576-1368, 577-1368, 578-1368, 579-1368, 580-1368, 581-1368, 582-1368, 583-1368, 584-1368, 585-1368, 586-1368, 587-1368, 588-1368, 589-1368, 590-1368, 591-1368, 592-1368, 593-1368, 594-1368, 595-1368, 596-1368, 597-1368, 598-1368, 599-1368, 600-1368, 601-1368, 602-1368, 603-1368, 604-1368, 605-1368, 606-1368, 607-1368, 608-1368, 609-1368, 610-1368, 611-1368, 612-1368, 613-1368, 614-1368, 615-1368, 616-1368, 617-1368, 618-1368, 619-1368, 620-1368, 621-1368, 622-1368, 623-1368, 624-1368, 625-1368, 626-1368, 627-1368, 628-1368, 629-1368, 630-1368, 631-1368, 632-1368, 633-1368, 634-1368, 635-1368, 636-1368, 637-1368, 638-1368, 639-1368, 640-1368, 641-1368, 642-1368, 643-1368, 644-1368, 645-1368, 646-1368, 647-1368, 648-1368, 649-1368, 650-1368, or 651-1368 of spCas9. In some embodiments, the C-terminal portion of the split Cas9 protein comprises a portion of amino acids 574-1368 or 638-1368 of SpCas9.

[0192] By “subject” is meant a mammal, including, but not limited to, a human or non-human mammal, such as a non-human primate (monkey), bovine, equine, canine, ovine, or feline. In some embodiments, a subject described herein includes a pathogenic mutation in a polynucleotide sequence.

[0193] By “substantially identical” is meant a polypeptide or nucleic acid molecule exhibiting at least 50% identity to a reference amino acid sequence (for example, any one of the amino acid sequences described herein) or nucleic acid sequence (for example, any one of the nucleic acid sequences described herein). In one embodiment, such a sequence is at least 60%, 80% or 85%, 90%, 95% or even 99% identical at the amino acid level or nucleic acid level to the sequence used for comparison.

[0194] Sequence identity is typically measured using sequence analysis software (for example, Sequence Analysis Software Package of the Genetics Computer Group, University of Wisconsin Biotechnology Center, 1710 University Avenue, Madison, Wis. 53705, BLAST, BESTFIT, COBALT, EMBOSS Needle, GAP, or PILEUP/PRETTYBOX programs). Such software matches identical or similar sequences by assigning degrees of homology to various substitutions, deletions, and/or other modifications. Conservative substitutions typically include substitutions within the following groups: glycine, alanine; valine, isoleucine, leucine; aspartic acid, glutamic acid, asparagine, glutamine; serine, threonine; lysine, arginine; and phenylalanine, tyrosine. In an exemplary approach to determining the degree of identity, a BLAST program may be used, with a probability score between e⁻³ and e⁻¹⁰⁰ indicating a closely related sequence. COBALT is used, for example, with the following parameters:
[0195] a) alignment parameters: Gap penalties-11, -1 and End-Gap penalties-5, -1,
[0196] b) CDD Parameters: Use RPS BLAST on; Blast E-value 0.003; Find Conserved columns and Recompute on, and
[0197] c) Query Clustering Parameters: Use query clusters on; Word Size 4; Max cluster distance 0.8; Alphabet Regular.
   EMBOSS Needle is used, for example, with the following parameters:
[0198] a) Matrix: BLOSUM62;
[0199] b) GAP OPEN: 10;
[0200] c) GAP EXTEND: 0.5;
[0201] d) OUTPUT FORMAT: pair;
[0202] e) END GAP PENALTY: false;
[0203] f) END GAP OPEN: 10; and
[0204] g) END GAP EXTEND: 0.5.

[0205] The term “target site” refers to a sequence within a nucleic acid molecule that is deaminated by a deaminase (e.g., cytidine or adenine deaminase) or a fusion protein comprising a deaminase (e.g., a dCas9-adenosine deaminase fusion protein or a base editor disclosed herein).

[0206] As used herein, the terms “treat,” treating,” “treatment,” and the like refer to reducing or ameliorating a disorder and/or symptoms associated therewith or obtaining a desired pharmacologic and/or physiologic effect. It will be appreciated that, although not precluded, treating a disorder or condition does not require that the disorder, condition or symptoms associated therewith be completely eliminated. In some embodiments, the effect is therapeutic, i.e., without limitation, the effect partially or completely reduces, diminishes, abrogates, abates, alleviates, decreases the intensity of, or cures a disease and/or adverse symptom attributable to the disease. In some embodiments, the effect is preventative, i.e., the effect protects or prevents an occurrence or reoccurrence of a disease or condition. To this end, the presently disclosed methods comprise administering a therapeutically effective amount of a compositions as described herein.

[0207] By “uracil glycosylase inhibitor” or “UGI” is meant an agent that inhibits the uracil-excision repair system. In one embodiment, the agent is a protein or fragment thereof that binds a host uracil-DNA glycosylase and prevents removal of uracil residues from DNA. In an embodiment, a UGI is a protein, a fragment thereof, or a domain that is capable of inhibiting a uracil-DNA glycosylase base-excision repair enzyme. In some embodiments, a UGI domain comprises a wild-type UGI or a modified version thereof. In some embodiments, a UGI domain comprises a fragment of the exemplary amino acid sequence set forth below. In some embodiments, a UGI fragment comprises an amino acid sequence that comprises at least 60%, at least 65%, at least 70%, at least 75%, at least 80%, at least 85%, at least 90%, at least 95%, at least 96%, at least 97%, at least 98%, at least 99%, or 100% of the exemplary UGI sequence provided below. In some embodiments, a UGI comprises an amino acid sequence that is homologous to the exemplary UGI amino acid sequence or fragment thereof, as set forth below. In some embodiments, the UGI, or a portion thereof, is at least 70%, at least 75%, at least 80%, at least 85%, at least 90%, at least 95%, at least 96%, at least 97%, at least 98%, at least 99%, at least 99.5%, at least 99.9%, or 100% identical to a wild type UGI or a UGI sequence, or portion thereof, as set forth below. An exemplary UGI comprises an amino acid sequence as follows:

>splP14739IUNGI_BPPB2 Uracil-DNA glycosylase
inhibitor
MTNLSDIIEKETGKQLVIQESILMLPEEVEEVIGNKPESDILVHTAYDE
STDENVMLLTSDAPEYKPWALVIQDSNGENKIKML.

[0208] Ranges provided herein are understood to be shorthand for all of the values within the range. For example, a range of 1 to 50 is understood to include any number, combination of numbers, or sub-range from the group consisting 1, 2, 3, 4, 5, 6, 7, 8, 9, 10, 11, 12, 13, 14, 15, 16, 17, 18, 19, 20, 21, 22, 23, 24, 25, 26, 27, 28, 29, 30, 31, 32, 33, 34, 35, 36, 37, 38, 39, 40, 41, 42, 43, 44, 45, 46, 47, 48, 49, or 50.

[0209] The recitation of a listing of chemical groups in any definition of a variable herein includes definitions of that variable as any single group or combination of listed groups. The recitation of an embodiment for a variable or aspect herein includes that embodiment as any single embodiment or in combination with any other embodiments or portions thereof.

[0210] Any compositions or methods provided herein can be combined with one or more of any of the other compositions and methods provided herein.

[0211] The description and examples herein illustrate embodiments of the present disclosure in detail. It is to be understood that this disclosure is not limited to the particular embodiments described herein and as such can vary. Those of skill in the art will recognize that there are numerous variations and modifications of this disclosure, which are encompassed within its scope.

[0212] All terms are intended to be understood as they would be understood by a person skilled in the art. Unless defined otherwise, all technical and scientific terms used herein have the same meaning as commonly understood by one of ordinary skill in the art to which the disclosure pertains.

[0213] The practice of some embodiments disclosed herein employ, unless otherwise indicated, conventional techniques of immunology, biochemistry, chemistry, molecular biology, microbiology, cell biology, genomics and recombinant DNA, which are within the skill of the art. See for example Sambrook and Green, Molecular Cloning: A Laboratory Manual, 4th Edition (2012); the series Current Protocols in Molecular Biology (F. M. Ausubel, et al. eds.); the series Methods In Enzymology (Academic Press, Inc.), PCR 2: A Practical Approach (M. J. MacPherson, B. D. Hames and G. R. Taylor eds. (1995)), Harlow and Lane, eds. (1988) Antibodies, A Laboratory Manual, and Culture of Animal Cells: A Manual of Basic Technique and Specialized Applications, 6th Edition (R. I. Freshney, ed. (2010)).

[0214] Although various features of the present disclosure can be described in the context of a single embodiment, the features can also be provided separately or in any suitable combination. Conversely, although the present disclosure can be described herein in the context of separate embodiments for clarity, the present disclosure can also be implemented in a single embodiment. The section headings used herein are for organizational purposes only and are not to be construed as limiting the subject matter described.

[0215] The features of the present disclosure are set forth with particularity in the appended claims. A better understanding of the features and advantages of the present will be obtained by reference to the following detailed description that sets forth illustrative embodiments, in which the principles of the disclosure are utilized, and in view of the accompanying drawings as described hereinbelow.

### BRIEF DESCRIPTION OF THE DRAWINGS

[0216] FIG. 1 presents a series of graphs showing percent A>G editing activity for the designated adenosine base editors. Each of the editors is referred to by number where, for example, 433 denotes pNMG-B433, which is ABE8.32. Each of the editors referenced in the graph was tested with each of gRNAs HRB03, HRB04, HRB08, HRB12, and ng-424. The gRNA sequences are provided in Example 3.

[0217] FIG. 2 provides a heat map depicting in gray shading percent A>G editing activity for the designated adenosine base editors (ABE8 and ABE9), which are described at Table 14. Each of the editors listed in the figure was tested with a different gRNA, HRB03, HRB04, HRB08, HRB12, and ng-424.

[0218] FIGS. 3A-3C provide tables showing TadA deaminase variant (e.g., TadA*9; ABE9) and Cas9 (e.g., SpCas9) variant components of adenosine base editors described herein. These ABE9 base editors have A>G editing activity and are useful for correcting SNP mutations associated with alpha-1 antitrypsin disease (A1AD), such as the PiZ mutation in the SERPINA1 gene. In some cases, the SpCas9 variants have specificity for 5′-NGC-3′ PAMs. FIG. 3A refers to the adenosine base editors by their plasmid number. FIGS. 3B and 3C present various TadA deaminase variants and amino acid mutations included in the Tad*7.10 amino acid sequence, as well as PAM variants and their included amino acid mutations.

[0219] FIGS. 4A-4D present a nucleic acid sequence, a table and graphs related to producing improved rates of nucleobase correction through base editor engineering. FIGS. 4A and 4B present a nucleic acid sequence and a table related to produing improved rates of nucleobase correction in primary PiZZ fibroblasts through base editor engineering as described in FIGS. 4C and 4D and related to increasing serum alpha-1 antitrypsin (A1AT) produced by lipid nanoparticle (LNP)-mediated delivery and base editing in NSG-PiZ transgenic mice as described in FIGS. 5A and 5B infra. In particular, FIG. 4A shows the target DNA sequence, including the target site (the A at position 7 in the target DNA sequence), encoding the PiZZ mutation associated with A1AD. This sequence includes the 20 nucleotide protospacer and a non-canonical spCas9 NGC PAM. Shown also are beneficial edits at position A7=wild-type (WT) and edits at positions A5 and A7=WT+D341G. FIG. 4B presents a table describing the TadA deaminase variant and the Cas9 PAM variant constituents of the various base editors used to correct the PiZ mutation. The table shows the variants (e.g., Variants (Vars) 1-9) as used to obtain the results provided in FIGS. 4C, 4D, 5A and 5B. In the table, amino acid mutations in SpCas9 (SpCas9 variants) are depicted in the rightmost column of the table (PAM variant). The “RVRFRAR” SpCas9 variant includes the following mutations: L1111R+D1135V+G1218R+E1219F+A1322R+R1335A+T1337R. FIGS. 4C and 4D present bar-graphs depicting the editing rates observed in patient-derived PiZZ fibroblasts (GM11423 Corriel Biorepository) that were transfected with base editing reagents using the Neon electroporation system. Each treatment consisted of 10 μl electroporation buffer containing 70,000 fibroblasts, 100 ng mRNA encoding the base editor and 50 ng Alpha-1 correction gRNA. After 48 hours of recovery, the cells were lysed, and the locus of interest was interrogated by targeted amplicon sequencing. The data were obtained from two independent experiments. These data and results demonstrate the improvements in target base editing efficiency from both optimization of the NGC PAM recognition (variants 1-3, FIGS. 4B and 4C) and optimization of the TadA deaminase through incorporation of mutations in the TadA deaminase, e.g., ABE9, (variants 4-9, FIGS. 4B-4D).

[0220] FIGS. 5A and 5B present graphs related to the increase in serum A1A•T produced by lipid nanoparticle (LNP)-mediated delivery and base editing in NSG-PiZ transgenic mice. The target site DNA sequence and the table of the TadA deaminase variant and Cas9 PAM variant constituents of the various editors used to correct the PiZ mutation are as described in FIGS. 4A and 4B above. FIG. 5A presents a graph depicting the editing rates observed in total liver gDNA from the NSG-PiZ transgenic mouse model 7 days after treatment with 1.5 mg/kg of LNP containing a 1:1 weight ratio of gRNA and mRNA encoding base editor. Commercially available NSG-PiZ mice (The Jackson Laboratory, Mount Desert Island, Me.) express mutant human SERPINA1 (Glu342Lys mutation) on the immunodeficient NOD-SCID gamma (NSG) background, which provides a stable background for human hepatocytes after partial hepatectomy. The results demonstrate that the ngcABEvar9 (FIG. 4B) yielded higher rates of editing than the earlier version variant 8. FIG. 5B presents a graph showing that the editing rates are correlated with an increase in serum Alpha-1 Antitrypsin (A1AT), (post-bleed), relative to pretreatment samples, (pre-bleed), as measured by an MSD Sandwich Immunoassay. Based on these results, base editing with the TadA deaminase variants described herein is capable of addressing a deficiency of alpha-1 antitrypsin and its potential pulmonary sequelae.

### DETAILED DESCRIPTION OF THE INVENTION

[0221] The invention features novel adenine base editors (e.g., ABE9) and methods of using these adenosine deaminase variants for editing a target sequence.

### Nucleobase Editor

[0222] Disclosed herein are novel base editors (e.g., ABE8 and ABE9) or nucleobase editors for editing, modifying or altering a target nucleotide sequence of a polynucleotide. In particular, the novel ABE9 base editor and its component adenosine deaminase are described in Tables 14 and 18 infra. Described herein is a nucleobase editor or a base editor comprising a polynucleotide programmable nucleotide binding domain and a nucleobase editing domain (e.g., adenosine deaminase). A polynucleotide programmable nucleotide binding domain, when in conjunction with a bound guide polynucleotide (e.g., gRNA), can specifically bind to a target polynucleotide sequence (i.e., via complementary base pairing between bases of the bound guide nucleic acid and bases of the target polynucleotide sequence) and thereby localize the base editor to the target nucleic acid sequence desired to be edited. In some embodiments, the target polynucleotide sequence comprises single-stranded DNA or double-stranded DNA. In some embodiments, the target polynucleotide sequence comprises RNA. In some embodiments, the target polynucleotide sequence comprises a DNA-RNA hybrid.

### Polynucleotide Programmable Nucleotide Binding Domain

[0223] It should be appreciated that polynucleotide programmable nucleotide binding domains can also include nucleic acid programmable proteins that bind RNA. For example, the polynucleotide programmable nucleotide binding domain can be associated with a nucleic acid that guides the polynucleotide programmable nucleotide binding domain to an RNA. Other nucleic acid programmable DNA binding proteins are also within the scope of this disclosure, though they are not specifically listed in this disclosure.

[0224] A polynucleotide programmable nucleotide binding domain of a base editor can itself comprise one or more domains. For example, a polynucleotide programmable nucleotide binding domain can comprise one or more nuclease domains. In some embodiments, the nuclease domain of a polynucleotide programmable nucleotide binding domain can comprise an endonuclease or an exonuclease. Herein the term “exonuclease” refers to a protein or polypeptide capable of digesting a nucleic acid (e.g., RNA or DNA) from free ends, and the term “endonuclease” refers to a protein or polypeptide capable of catalyzing (e.g., cleaving) internal regions in a nucleic acid (e.g., DNA or RNA). In some embodiments, an endonuclease can cleave a single strand of a double-stranded nucleic acid. In some embodiments, an endonuclease can cleave both strands of a double-stranded nucleic acid molecule. In some embodiments a polynucleotide programmable nucleotide binding domain can be a deoxyribonuclease. In some embodiments a polynucleotide programmable nucleotide binding domain can be a ribonuclease.

[0225] In some embodiments, a nuclease domain of a polynucleotide programmable nucleotide binding domain can cut zero, one, or two strands of a target polynucleotide. In some cases, the polynucleotide programmable nucleotide binding domain can comprise a nickase domain. Herein the term “nickase” refers to a polynucleotide programmable nucleotide binding domain comprising a nuclease domain that is capable of cleaving only one strand of the two strands in a duplexed nucleic acid molecule (e.g., DNA). In some embodiments, a nickase can be derived from a fully catalytically active (e.g., natural) form of a polynucleotide programmable nucleotide binding domain by introducing one or more mutations into the active polynucleotide programmable nucleotide binding domain. For example, where a polynucleotide programmable nucleotide binding domain comprises a nickase domain derived from Cas9, the Cas9-derived nickase domain can include a D10A mutation and a histidine at position 840. In such cases, the residue H840 retains catalytic activity and can thereby cleave a single strand of the nucleic acid duplex. In another example, a Cas9-derived nickase domain can comprise an H840A mutation, while the amino acid residue at position 10 remains a D. In some embodiments, a nickase can be derived from a fully catalytically active (e.g., natural) form of a polynucleotide programmable nucleotide binding domain by removing all or a portion of a nuclease domain that is not required for the nickase activity. For example, where a polynucleotide programmable nucleotide binding domain comprises a nickase domain derived from Cas9, the Cas9-derived nickase domain can comprise a deletion of all or a portion of the RuvC domain or the HNH domain.

[0226] The amino acid sequence of an exemplary catalytically active Cas9 is as follows:

MDKKYSIGLDIGTNSVGWAVITDEYKVPSKKFKVLGNTDRHSIKKNLIGALLFDSGETAEAT
RLKRTARRRYTRRKNRICYLQEIFSNEMAKVDDSFFHRLEESFLVEEDKKHERHPIFGNIVD
EVAYHEKYPTIYHLRKKLVDSTDKADLRLIYLALAHMIKFRGHFLIEGDLNPDNSDVDKLFI
QLVQTYNQLFEENPINASGVDAKAILSARLSKSRRLENLIAQLPGEKKNGLFGNLIALSLGL
TPNFKSNFDLAEDAKLQLSKDTYDDDLDNLLAQIGDQYADLFLAAKNLSDAILLSDILRVNT
EITKAPLSASMIKRYDEHHQDLTLLKALVRQQLPEKYKEIFFDQSKNGYAGYIDGGASQEEF
YKFIKPILEKMDGTEELLVKLNREDLLRKQRTFDNGSIPHQIHLGELHAILRRQEDFYPFLK
DNREKIEKILTFRIPYYVGPLARGNSRFAWMTRKSEETITPWNFEEVVDKGASAQSFIERMT
NFDKNLPNEKVLPKHSLLYEYFTVYNELTKVKYVTEGMRKPAFLSGEQKKAIVDLLFKTNRK
VTVKQLKEDYFKKIECFDSVEISGVEDRFNASLGTYHDLLKIIKDKDFLDNEENEDILEDIV
LTLTLFEDREMIEERLKTYAHLFDDKVMKQLKRRRYTGWGRLSRKLINGIRDKQSGKTILDF
LKSDGFANRNFMQLIHDDSLTFKEDIQKAQVSGQGDSLHEHIANLAGSPAIKKGILQTVKVV
DELVKVMGRHKPENIVIEMARENQTTQKGQKNSRERMKRIEEGIKELGSQILKEHPVENTQL
QNEKLYLYYLQNGRDMYVDQELDINRLSDYDVDHIVPQSFLKDDSIDNKVLTRSDKNRGKSD
NVPSEEVVKKMKNYWRQLLNAKLITQRKFDNLTKAERGGLSELDKAGFIKRQLVETRQITKH
VAQILDSRMNTKYDENDKLIREVKVITLKSKLVSDFRKDFQFYKVREINNYHHAHDAYLNAV
VGTALIKKYPKLESEFVYGDYKVYDVRKMIAKSEQEIGKATAKYFFYSNIMNFFKTEITLAN
GEIRKRPLIETNGETGEIVWDKGRDFATVRKVLSMPQVNIVKKTEVQTGGFSKESILPKRNS
DKLIARKKDWDPKKYGGFDSPTVAYSVLVVAKVEKGKSKKLKSVKELLGITIMERSSFEKNP
IDFLEAKGYKEVKKDLIIKLPKYSLFELENGRKRMLASAGELQKGNELALPSKYVNFLYLAS
HYEKLKGSPEDNEQKQLFVEQHKHYLDEIIEQISEFSKRVILADANLDKVLSAYNKHRDKPI
REQAENIIHLFTLTNLGAPAAFKYFDTTIDRKRYTSTKEVLDATLIHQSITGLYETRIDLSQ
LGGD.

[0227] A base editor comprising a polynucleotide programmable nucleotide binding domain comprising a nickase domain is thus able to generate a single-strand DNA break (nick) at a specific polynucleotide target sequence (e.g., determined by the complementary sequence of a bound guide nucleic acid). In some embodiments, the strand of a nucleic acid duplex target polynucleotide sequence that is cleaved by a base editor comprising a nickase domain (e.g., Cas9-derived nickase domain) is the strand that is not edited by the base editor (i.e., the strand that is cleaved by the base editor is opposite to a strand comprising a base to be edited). In other embodiments, a base editor comprising a nickase domain (e.g., Cas9-derived nickase domain) can cleave the strand of a DNA molecule which is being targeted for editing. In such cases, the non-targeted strand is not cleaved.

[0228] Also provided herein are base editors comprising a polynucleotide programmable nucleotide binding domain which is catalytically dead (i.e., incapable of cleaving a target polynucleotide sequence). Herein the terms “catalytically dead” and “nuclease dead” are used interchangeably to refer to a polynucleotide programmable nucleotide binding domain which has one or more mutations and/or deletions resulting in its inability to cleave a strand of a nucleic acid. In some embodiments, a catalytically dead polynucleotide programmable nucleotide binding domain base editor can lack nuclease activity as a result of specific point mutations in one or more nuclease domains. For example, in the case of a base editor comprising a Cas9 domain, the Cas9 can comprise both a D10A mutation and an H840A mutation. Such mutations inactivate both nuclease domains, thereby resulting in the loss of nuclease activity. In other embodiments, a catalytically dead polynucleotide programmable nucleotide binding domain can comprise one or more deletions of all or a portion of a catalytic domain (e.g., RuvC1 and/or HNH domains). In further embodiments, a catalytically dead polynucleotide programmable nucleotide binding domain comprises a point mutation (e.g., D10A or H840A) as well as a deletion of all or a portion of a nuclease domain.

[0229] Also contemplated herein are mutations capable of generating a catalytically dead polynucleotide programmable nucleotide binding domain from a previously functional version of the polynucleotide programmable nucleotide binding domain. For example, in the case of catalytically dead Cas9 (“dCas9”), variants having mutations other than D10A and H840A are provided, which result in nuclease inactivated Cas9. Such mutations, by way of example, include other amino acid substitutions at D10 and H840, or other substitutions within the nuclease domains of Cas9 (e.g., substitutions in the HNH nuclease subdomain and/or the RuvC1 subdomain). Additional suitable nuclease-inactive dCas9 domains can be apparent to those of skill in the art based on this disclosure and knowledge in the field, and are within the scope of this disclosure. Such additional exemplary suitable nuclease-inactive Cas9 domains include, but are not limited to, D10A/H840A, D10A/D839A/H840A, and D10A/D839A/H840A/N863A mutant domains (See, e.g., Prashant et al., CAS9 transcriptional activators for target specificity screening and paired nickases for cooperative genome engineering. Nature Biotechnology. 2013; 31(9): 833-838, the entire contents of which are incorporated herein by reference).

[0230] Non-limiting examples of a polynucleotide programmable nucleotide binding domain which can be incorporated into a base editor include a CRISPR protein-derived domain, a restriction nuclease, a meganuclease, TAL nuclease (TALEN), and a zinc finger nuclease (ZFN). In some cases, a base editor comprises a polynucleotide programmable nucleotide binding domain comprising a natural or modified protein or portion thereof which via a bound guide nucleic acid is capable of binding to a nucleic acid sequence during CRISPR (i.e., Clustered Regularly Interspaced Short Palindromic Repeats)-mediated modification of a nucleic acid. Such a protein is referred to herein as a “CRISPR protein”. Accordingly, disclosed herein is a base editor comprising a polynucleotide programmable nucleotide binding domain comprising all or a portion of a CRISPR protein (i.e. a base editor comprising as a domain all or a portion of a CRISPR protein, also referred to as a “CRISPR protein-derived domain” of the base editor). A CRISPR protein-derived domain incorporated into a base editor can be modified compared to a wild-type or natural version of the CRISPR protein. For example, as described below a CRISPR protein-derived domain can comprise one or more mutations, insertions, deletions, rearrangements and/or recombinations relative to a wild-type or natural version of the CRISPR protein.

[0231] CRISPR is an adaptive immune system that provides protection against mobile genetic elements (viruses, transposable elements and conjugative plasmids). CRISPR clusters contain spacers, sequences complementary to antecedent mobile elements, and target invading nucleic acids. CRISPR clusters are transcribed and processed into CRISPR RNA (crRNA). In type II CRISPR systems, correct processing of pre-crRNA requires a trans-encoded small RNA (tracrRNA), endogenous ribonuclease 3 (rnc) and a Cas9 protein. The tracrRNA serves as a guide for ribonuclease 3-aided processing of pre-crRNA. Subsequently, Cas9/crRNA/tracrRNA endonucleolytically cleaves linear or circular dsDNA target complementary to the spacer. The target strand not complementary to crRNA is first cut endonucleolytically, and then trimmed 3′-5′ exonucleolytically. In nature, DNA-binding and cleavage typically requires protein and both RNAs. However, single guide RNAs (“sgRNA”, or simply “gNRA”) can be engineered so as to incorporate aspects of both the crRNA and tracrRNA into a single RNA species. See, e.g., Jinek M., Chylinski K., Fonfara I., Hauer M., Doudna J. A., Charpentier E. Science 337:816-821(2012), the entire contents of which is hereby incorporated by reference. Cas9 recognizes a short motif in the CRISPR repeat sequences (the PAM or protospacer adjacent motif) to help distinguish self-versus-non-self.

[0232] In some embodiments, the methods described herein can utilize an engineered Cas protein. A guide RNA (gRNA) is a short synthetic RNA composed of a scaffold sequence necessary for Cas-binding and a user-defined ˜20 nucleotide spacer that defines the genomic (or polynucleotide, e.g., DNA or RNA) target to be modified. Thus, a skilled artisan can change the genomic or polynucleotide target of the Cas protein by changing the target sequence present in the gRNA. The specificity of the Cas protein is partially determined by how specific the gRNA targeting sequence is for the genomic polynucleotide target sequence compared to the rest of the genome. In an embodiment, the Cas protein is SpCas9.

[0233] In some embodiments, the gRNA scaffold sequence is as follows:

GUUUUAGAGCUAGAAAUAGCAAGUUAAAAUAAGGCUAGUCCGUUAUCAA
CUUGAAAAAGUGGCACCGAGUCGGUGCUUUU.

[0234] In some embodiments, the gRNA scaffold sequence is as follows:

GUUUUAGAGCUAGAAAUAGCAAGUUAAAAUAAGGCUAGUCCGUUAUCAA
CUUGAAAAAGUGGGACCGAGUCGGUGCUUUU.

[0235] In an embodiment, the terminal uracils (U) of above gRNA scaffolds may optionally comprise “mU*mU*mU*U,” which denote 2′OMe and have phosphorothioate linkages.

[0236] In an embodiment, the RNA scaffold comprises a stem loop. In an embodiment, the RNA scaffold comprises the nucleic acid sequence:

GUUUUUGUACUCUCAAGAUUUAAGUAACUGUACAACGAAACUUACACAG
UUACUUAAAUCUUGCAGAAGCUACAAAGAUAAGGCUUCAUGCCGAAAUC
AACACCCUGUCAUUUUAUGGCAGGGUG.

[0237] In an embodiment, an S. pyrogenes sgRNA scaffold polynucleotide sequence is as follows:

GUUUUAGAGCUAGAAAUAGCAAGUUAAAAUAAGGCUAGUCCGUUAUCAA
CUUGAAAAAGUGGCACCGAGUCGGUGC.

[0238] In an embodiment, an S. aureus sgRNA scaffold polynucleotide sequence is as follows:

GUUUUAGUACUCUGUAAUGAAAAUUACAGAAUCUACUAAAACAAGGCAA
AAUGCCGUGUUUAUCUCGUCAACUUGUUGGCGAGA.

[0239] In an embodiment, a BhCas12b sgRNA scaffold has the following polynucleotide sequence:

GUUCUGTCUUUUGGUCAGGACAACCGUCUAGCUAUAAGUGCUGCAGGGU
GUGAGAAACUCCUAUUGCUGGACGAUGUCUCUUACGAGGCAUUAGCAC.

[0240] In an embodiment, a BvCas12b sgRNA scaffold has the following polynucleotide sequence:

GACCUAUAGGGUCAAUGAAUCUGUGCGUGUGCCAUAAGUAAUUAAAAAU
UACCCACCACAGGAGCACCUGAAAACAGGUGCUUGGCAC.

[0241] In some embodiments, a CRISPR protein-derived domain incorporated into a base editor is an endonuclease (e.g., deoxyribonuclease or ribonuclease) capable of binding a target polynucleotide when in conjunction with a bound guide nucleic acid. In some embodiments, a CRISPR protein-derived domain incorporated into a base editor is a nickase capable of binding a target polynucleotide when in conjunction with a bound guide nucleic acid. In some embodiments, a CRISPR protein-derived domain incorporated into a base editor is a catalytically dead domain capable of binding a target polynucleotide when in conjunction with a bound guide nucleic acid. In some embodiments, a target polynucleotide bound by a CRISPR protein derived domain of a base editor is DNA. In some embodiments, a target polynucleotide bound by a CRISPR protein-derived domain of a base editor is RNA.

[0242] Cas proteins that can be used herein include class 1 and class 2. Non-limiting examples of Cas proteins include Cas1, Cas1B, Cas2, Cas3, Cas4, Cas5, Cas5d, Cas5t, Cas5h, Cas5a, Cas6, Cas7, Cas8, Cas9 (also known as Csn1 or Csx12), Cas10, Csy1, Csy2, Csy3, Csy4, Cse1, Cse2, Cse3, Cse4, Cse5e, Csc1, Csc2, Csa5, Csn1, Csn2, Csm1, Csm2, Csm3, Csm4, Csm5, Csm6, Cmr1, Cmr3, Cmr4, Cmr5, Cmr6, Csb1, Csb2, Csb3, Csx17, Csx14, Csx10, Csx16, CsaX, Csx3, Csx1, Csx1S, Csf1, Csf2, CsO, Csf4, Csd1, Csd2, Cst1, Cst2, Csh1, Csh2, Csa1, Csa2, Csa3, Csa4, Csa5, Cas12a/Cpf1, Cas12b/C2c1, Cas12c/C2c3, Cas12d/CasY, Cas12e/CasX, Cas12g, Cas12h, Cas12i, and Cas12j/CasΦ, CARF, DinG, homologues thereof, or modified versions thereof. An unmodified CRISPR enzyme can have DNA cleavage activity, such as Cas9, which has two functional endonuclease domains: RuvC and HNH. A CRISPR enzyme can direct cleavage of one or both strands at a target sequence, such as within a target sequence and/or within a complement of a target sequence. For example, a CRISPR enzyme can direct cleavage of one or both strands within about 1, 2, 3, 4, 5, 6, 7, 8, 9, 10, 15, 20, 25, 50, 100, 200, 500, or more base pairs from the first or last nucleotide of a target sequence.

[0243] A vector that encodes a CRISPR enzyme that is mutated to with respect, to a corresponding wild-type enzyme such that the mutated CRISPR enzyme lacks the ability to cleave one or both strands of a target polynucleotide containing a target sequence can be used. Cas9 can refer to a polypeptide with at least or at least about 50%, 60%, 70%, 80%, 90%, 91%, 92%, 93%, 94%, 95%, 96%, 97%, 98%, 99%, or 100% sequence identity and/or sequence homology to a wild type exemplary Cas9 polypeptide (e.g., Cas9 from S. pyogenes). Cas9 can refer to a polypeptide with at most or at most about 50%, 60%, 70%, 80%, 90%, 91%, 92%, 93%, 94%, 95%, 96%, 97%, 98%, 99%, or 100% sequence identity and/or sequence homology to a wild type exemplary Cas9 polypeptide (e.g., from S. pyogenes). Cas9 can refer to the wild type or a modified form of the Cas9 protein that can comprise an amino acid change such as a deletion, insertion, substitution, variant, mutation, fusion, chimera, or any combination thereof.

[0244] In some embodiments, a CRISPR protein-derived domain of a base editor can include all or a portion of Cas9 from Corynebacterium ulcerans (NCBI Refs: NC_015683.1, NC_017317.1); Corynebacterium diphtheria (NCBI Refs: NC_016782.1, NC_016786.1); Spiroplasma syrphidicola (NCBI Ref: NC_021284.1); Prevotella intermedia (NCBI Ref: NC_017861.1); Spiroplasma taiwanense (NCBI Ref: NC_021846.1); Streptococcus iniae (NCBI Ref: NC_021314.1); Belliella baltica (NCBI Ref: NC_018010.1); Psychrojlexus torquis (NCBI Ref: NC_018721.1); Streptococcus thermophilus (NCBI Ref: YP_820832.1); Listeria innocua (NCBI Ref: NP 472073.1); Campylobacter jejuni (NCBI Ref: YP_002344900.1); Neisseria meningitidis (NCBI Ref: YP_002342100.1), Streptococcus pyogenes, or Staphylococcus aureus.

Cas9 domains of Nucleobase Editors

[0245] Cas9 nuclease sequences and structures are well known to those of skill in the art (See, e.g., “Complete genome sequence of an Ml strain of Streptococcus pyogenes.” Ferretti et al., Proc. Natl. Acad. Sci. U.S.A. 98:4658-4663(2001); “CRISPR RNA maturation by trans-encoded small RNA and host factor RNase III.” Deltcheva E. et al., Nature 471:602-607(2011); and “A programmable dual-RNA-guided DNA endonuclease in adaptive bacterial immunity.” Jinek M. et al., Science 337:816-821(2012), the entire contents of each of which are incorporated herein by reference). Cas9 orthologs have been described in various species, including, but not limited to, S. pyogenes and S. thermophilus. Additional suitable Cas9 nucleases and sequences will be apparent to those of skill in the art based on this disclosure, and such Cas9 nucleases and sequences include Cas9 sequences from the organisms and loci disclosed in Chylinski, Rhun, and Charpentier, “The tracrRNA and Cas9 families of type II CRISPR-Cas immunity systems” (2013) RNA Biology 10:5, 726-737; the entire contents of which are incorporated herein by reference.

[0246] In some aspects, a nucleic acid programmable DNA binding protein (napDNAbp) is a Cas9 domain. Non-limiting, exemplary Cas9 domains are provided herein. The Cas9 domain may be a nuclease active Cas9 domain, a nuclease inactive Cas9 domain, or a Cas9 nickase. In some embodiments, the Cas9 domain is a nuclease active domain. For example, the Cas9 domain may be a Cas9 domain that cuts both strands of a duplexed nucleic acid (e.g., both strands of a duplexed DNA molecule). In some embodiments, the Cas9 domain comprises any one of the amino acid sequences as set forth herein. In some embodiments the Cas9 domain comprises an amino acid sequence that is at least 60%, at least 65%, at least 70%, at least 75%, at least 80%, at least 85%, at least 90%, at least 95%, at least 96%, at least 97%, at least 98%, at least 99%, or at least 99.5% identical to any one of the amino acid sequences set forth herein. In some embodiments, the Cas9 domain comprises an amino acid sequence that has 1, 2, 3, 4, 5, 6, 7, 8, 9, 10, 11, 12, 13, 14, 15, 16, 17, 18, 19, 20, 21, 22, 23, 24, 25, 26, 27, 28, 29, 30, 31, 32, 33, 34, 35, 36, 37, 38, 39, 40, 41, 42, 43, 44, 45, 46, 47, 48, 49, 50 or more mutations compared to any one of the amino acid sequences set forth herein. In some embodiments, the Cas9 domain comprises an amino acid sequence that has at least 10, at least 15, at least 20, at least 30, at least 40, at least 50, at least 60, at least 70, at least 80, at least 90, at least 100, at least 150, at least 200, at least 250, at least 300, at least 350, at least 400, at least 500, at least 600, at least 700, at least 800, at least 900, at least 1000, at least 1100, or at least 1200 identical contiguous amino acid residues as compared to any one of the amino acid sequences set forth herein.

[0247] In some embodiments, proteins comprising fragments of Cas9 are provided. For example, in some embodiments, a protein comprises one of two Cas9 domains: (1) the gRNA binding domain of Cas9; or (2) the DNA cleavage domain of Cas9. In some embodiments, proteins comprising Cas9 or fragments thereof are referred to as “Cas9 variants.” A Cas9 variant shares homology to Cas9, or a fragment thereof. For example, a Cas9 variant is at least about 70% identical, at least about 80% identical, at least about 90% identical, at least about 95% identical, at least about 96% identical, at least about 97% identical, at least about 98% identical, at least about 99% identical, at least about 99.5% identical, or at least about 99.9% identical to wild type Cas9. In some embodiments, the Cas9 variant may have 1, 2, 3, 4, 5, 6, 7, 8, 9, 10, 11, 12, 13, 14, 15, 16, 17, 18, 19, 20, 21, 22, 23, 24, 25, 26, 27, 28, 29, 30, 31, 32, 33, 34, 35, 36, 37, 38, 39, 40, 41, 42, 43, 44, 45, 46, 47, 48, 49, 50 or more amino acid changes compared to wild type Cas9. In some embodiments, the Cas9 variant comprises a fragment of Cas9 (e.g., a gRNA binding domain or a DNA-cleavage domain), such that the fragment is at least about 70% identical, at least about 80% identical, at least about 90% identical, at least about 95% identical, at least about 96% identical, at least about 97% identical, at least about 98% identical, at least about 99% identical, at least about 99.5% identical, or at least about 99.9% identical to the corresponding fragment of wild type Cas9. In some embodiments, the fragment is at least 30%, at least 35%, at least 40%, at least 45%, at least 50%, at least 55%, at least 60%, at least 65%, at least 70%, at least 75%, at least 80%, at least 85%, at least 90%, at least 95% identical, at least 96%, at least 97%, at least 98%, at least 99%, or at least 99.5% of the amino acid length of a corresponding wild type Cas9. In some embodiments, the fragment is at least 100 amino acids in length. In some embodiments, the fragment is at least 100, 150, 200, 250, 300, 350, 400, 450, 500, 550, 600, 650, 700, 750, 800, 850, 900, 950, 1000, 1050, 1100, 1150, 1200, 1250, or at least 1300 amino acids in length.

[0248] In some embodiments, Cas9 fusion proteins as provided herein comprise the full-length amino acid sequence of a Cas9 protein, e.g., one of the Cas9 sequences provided herein. In other embodiments, however, fusion proteins as provided herein do not comprise a full-length Cas9 sequence, but only one or more fragments thereof. Exemplary amino acid sequences of suitable Cas9 domains and Cas9 fragments are provided herein, and additional suitable sequences of Cas9 domains and fragments will be apparent to those of skill in the art.

[0249] A Cas9 protein can associate with a guide RNA that guides the Cas9 protein to a specific DNA sequence that has complementary to the guide RNA. In some embodiments, the polynucleotide programmable nucleotide binding domain is a Cas9 domain, for example a nuclease active Cas9, a Cas9 nickase (nCas9), or a nuclease inactive Cas9 (dCas9). Examples of nucleic acid programmable DNA binding proteins include, without limitation, Cas9 (e.g., dCas9 and nCas9), Cas12a/Cpf1, Cas12b/C2c1, Cas12c/C2c3, Cas12d/CasY, Cas12e/CasX, Cas12g, Cas12h, Cas12i, and Cas12j/CasΦ. Non-limiting examples of Cas enzymes include Cas1, Cas1B, Cas2, Cas3, Cas4, Cas5, Cas5d, Cas5t, Cas5h, Cas5a, Cas6, Cas7, Cas8, Cas8a, Cas8b, Cas8c, Cas9 (also known as Csn1 or Csx12), Cas10, Cas10d, Cas12a/Cpf1, Cas12b/C2c1, Cas12c/C2c3, Cas12d/CasY, Cas12e/CasX, Cas12g, Cas12h, Cas12i, Cas12j/CasΦ, Csy1, Csy2, Csy3, Csy4, Cse1, Cse2, Cse3, Cse4, Cse5e, Csc1, Csc2, Csa5, Csn1, Csn2, Csm1, Csm2, Csm3, Csm4, Csm5, Csm6, Cmr1, Cmr3, Cmr4, Cmr5, Cmr6, Csb1, Csb2, Csb3, Csx17, Csx14, Csx10, Csx16, CsaX, Csx3, Csx1, Csx1S, Csx11, Csf1, Csf2, CsO, Csf4, Csd1, Csd2, Cst1, Cst2, Csh1, Csh2, Csa1, Csa2, Csa3, Csa4, Csa5, Type II Cas effector proteins, Type V Cas effector proteins, Type VI Cas effector proteins, CARF, DinG, homologues thereof, or modified or engineered versions thereof.

[0250] In some embodiments, wild type Cas9 corresponds to Cas9 from Streptococcus pyogenes (NCBI Reference Sequence: NC_017053.1, nucleotide and amino acid sequences as follows).

ATGGATAAGAAATACTCAATAGGCTTAGATATCGGCACAAATAGCGTCGGATGGGCGGTGAT
CACTGATGATTATAAGGTTCCGTCTAAAAAGTTCAAGGTTCTGGGAAATACAGACCGCCACA
GTATCAAAAAAAATCTTATAGGGGCTCTTTTATTTGGCAGTGGAGAGACAGCGGAAGCGACT
CGTCTCAAACGGACAGCTCGTAGAAGGTATACACGTCGGAAGAATCGTATTTGTTATCTACA
GGAGATTTTTTCAAATGAGATGGCGAAAGTAGATGATAGTTTCTTTCATCGACTTGAAGAGT
CTTTTTTGGTGGAAGAAGACAAGAAGCATGAACGTCATCCTATTTTTGGAAATATAGTAGAT
GAAGTTGCTTATCATGAGAAATATCCAACTATCTATCATCTGCGAAAAAAATTGGCAGATTC
TACTGATAAAGCGGATTTGCGCTTAATCTATTTGGCCTTAGCGCATATGATTAAGTTTCGTG
GTCATTTTTTGATTGAGGGAGATTTAAATCCTGATAATAGTGATGTGGACAAACTATTTATC
CAGTTGGTACAAATCTACAATCAATTATTTGAAGAAAACCCTATTAACGCAAGTAGAGTAGA
TGCTAAAGCGATTCTTTCTGCACGATTGAGTAAATCAAGACGATTAGAAAATCTCATTGCTC
AGCTCCCCGGTGAGAAGAGAAATGGCTTGTTTGGGAATCTCATTGCTTTGTCATTGGGATTG
ACCCCTAATTTTAAATCAAATTTTGATTTGGCAGAAGATGCTAAATTACAGCTTTCAAAAGA
TACTTACGATGATGATTTAGATAATTTATTGGCGCAAATTGGAGATCAATATGCTGATTTGT
TTTTGGCAGCTAAGAATTTATCAGATGCTATTTTACTTTCAGATATCCTAAGAGTAAATAGT
GAAATAACTAAGGCTCCCCTATCAGCTTCAATGATTAAGCGCTACGATGAACATCATCAAGA
CTTGACTCTTTTAAAAGCTTTAGTTCGACAACAACTTCCAGAAAAGTATAAAGAAATCTTTT
TTGATCAATCAAAAAACGGATATGCAGGTTATATTGATGGGGGAGCTAGCCAAGAAGAATTT
TATAAATTTATCAAACCAATTTTAGAAAAAATGGATGGTACTGAGGAATTATTGGTGAAACT
AAATCGTGAAGATTTGCTGCGCAAGCAACGGACCTTTGACAACGGCTCTATTCCCCATCAAA
TTCACTTGGGTGAGCTGCATGCTATTTTGAGAAGACAAGAAGACTTTTATCCATTTTTAAAA
GACAATCGTGAGAAGATTGAAAAAATCTTGACTTTTCGAATTCCTTATTATGTTGGTCCATT
GGCGCGTGGCAATAGTCGTTTTGCATGGATGACTCGGAAGTCTGAAGAAACAATTACCCCAT
GGAATTTTGAAGAAGTTGTCGATAAAGGTGCTTCAGCTCAATCATTTATTGAACGCATGACA
AACTTTGATAAAAATCTTCCAAATGAAAAAGTACTACCAAAACATAGTTTGCTTTATGAGTA
TTTTACGGTTTATAACGAATTGACAAAGGTCAAATATGTTACTGAGGGAATGCGAAAACCAG
CATTTCTTTCAGGTGAACAGAAGAAAGCCATTGTTGATTTACTCTTCAAAACAAATCGAAAA
GTAACCGTTAAGCAATTAAAAGAAGATTATTTCAAAAAAATAGAATGTTTTGATAGTGTTGA
AATTTCAGGAGTTGAAGATAGATTTAATGCTTCATTAGGCGCCTACCATGATTTGCTAAAAA
TTATTAAAGATAAAGATTTTTTGGATAATGAAGAAAATGAAGATATCTTAGAGGATATTGTT
TTAACATTGACCTTATTTGAAGATAGGGGGATGATTGAGGAAAGACTTAAAACATATGCTCA
CCTCTTTGATGATAAGGTGATGAAACAGCTTAAACGTCGCCGTTATACTGGTTGGGGACGTT
TGTCTCGAAAATTGATTAATGGTATTAGGGATAAGCAATCTGGCAAAACAATATTAGATTTT
TTGAAATCAGATGGTTTTGCCAATCGCAATTTTATGCAGCTGATCCATGATGATAGTTTGAC
ATTTAAAGAAGATATTCAAAAAGCACAGGTGTCTGGACAAGGCCATAGTTTACATGAACAGA
TTGCTAACTTAGCTGGCAGTCCTGCTATTAAAAAAGGTATTTTACAGACTGTAAAAATTGTT
GATGAACTGGTCAAAGTAATGGGGCATAAGCCAGAAAATATCGTTATTGAAATGGCACGTGA
AAATCAGACAACTCAAAAGGGCCAGAAAAATTCGCGAGAGCGTATGAAACGAATCGAAGAAG
GTATCAAAGAATTAGGAAGTCAGATTCTTAAAGAGCATCCTGTTGAAAATACTCAATTGCAA
AATGAAAAGCTCTATCTCTATTATCTACAAAATGGAAGAGACATGTATGTGGACCAAGAATT
AGATATTAATCGTTTAAGTGATTATGATGTCGATCACATTGTTCCACAAAGTTTCATTAAAG
ACGATTCAATAGACAATAAGGTACTAACGCGTTCTGATAAAAATCGTGGTAAATCGGATAAC
GTTCCAAGTGAAGAAGTAGTCAAAAAGATGAAAAACTATTGGAGACAACTTCTAAACGCCAA
GTTAATCACTCAACGTAAGTTTGATAATTTAACGAAAGCTGAACGTGGAGGTTTGAGTGAAC
TTGATAAAGCTGGTTTTATCAAACGCCAATTGGTTGAAACTCGCCAAATCACTAAGCATGTG
GCACAAATTTTGGATAGTCGCATGAATACTAAATACGATGAAAATGATAAACTTATTCGAGA
GGTTAAAGTGATTACCTTAAAATCTAAATTAGTTTCTGACTTCCGAAAAGATTTCCAATTCT
ATAAAGTACGTGAGATTAACAATTACCATCATGCCCATGATGCGTATCTAAATGCCGTCGTT
GGAACTGCTTTGATTAAGAAATATCCAAAACTTGAATCGGAGTTTGTCTATGGTGATTATAA
AGTTTATGATGTTCGTAAAATGATTGCTAAGTCTGAGCAAGAAATAGGCAAAGCAACCGCAA
AATATTTCTTTTACTCTAATATCATGAACTTCTTCAAAACAGAAATTACACTTGCAAATGGA
GAGATTCGCAAACGCCCTCTAATCGAAACTAATGGGGAAACTGGAGAAATTGTCTGGGATAA
AGGGCGAGATTTTGCCACAGTGCGCAAAGTATTGTCCATGCCCCAAGTCAATATTGTCAAGA
AAACAGAAGTACAGACAGGCGGATTCTCCAAGGAGTCAATTTTACCAAAAAGAAATTCGGAC
AAGCTTATTGCTCGTAAAAAAGACTGGGATCCAAAAAAATATGGTGGTTTTGATAGTCCAAC
GGTAGCTTATTCAGTCCTAGTGGTTGCTAAGGTGGAAAAAGGGAAATCGAAGAAGTTAAAAT
CCGTTAAAGAGTTACTAGGGATCACAATTATGGAAAGAAGTTCCTTTGAAAAAAATCCGATT
GACTTTTTAGAAGCTAAAGGATATAAGGAAGTTAAAAAAGACTTAATCATTAAACTACCTAA
ATATAGTCTTTTTGAGTTAGAAAACGGTCGTAAACGGATGCTGGCTAGTGCCGGAGAATTAC
AAAAAGGAAATGAGCTGGCTCTGCCAAGCAAATATGTGAATTTTTTATATTTAGCTAGTCAT
TATGAAAAGTTGAAGGGTAGTCCAGAAGATAACGAACAAAAACAATTGTTTGTGGAGCAGCA
TAAGCATTATTTAGATGAGATTATTGAGCAAATCAGTGAATTTTCTAAGCGTGTTATTTTAG
CAGATGCCAATTTAGATAAAGTTCTTAGTGCATATAACAAACATAGAGACAAACCAATACGT
GAACAAGCAGAAAATATTATTCATTTATTTACGTTGACGAATCTTGGAGCTCCCGCTGCTTT
TAAATATTTTGATACAACAATTGATCGTAAACGATATACGTCTACAAAAGAAGTTTTAGATG
CCACTCTTATCCATCAATCCATCACTGGTCTTTATGAAACACGCATTGATTTGAGTCAGCTA
GGAGGTGACTGA
MDKKYSIGLDIGTNSVGWAVITDDYKVPSKKFKVLGNTDRHSIKKNLIGALLFGSGETAEAT
RLKRTARRRYTRRKNRICYLQEIFSNEMAKVDDSFFHRLEESFLVEEDKKHERHPIFGNIVD
EVAYHEKYPTIYHLRKKLADSTDKADLRLIYLALAHMIKFRGHFLIEGDLNPDNSDVDKLFI
QLVQIYNQLFEENPINASRVDAKAILSARLSKSRRLENLIAQLPGEKRNGLFGNLIALSLGL
TPNFKSNFDLAEDAKLQLSKDTYDDDLDNLLAQIGDQYADLFLAAKNLSDAILLSDILRVNS
EITKAPLSASMIKRYDEHHQDLTLLKALVRQQLPEKYKEIFFDQSKNGYAGYIDGGASQEEF
YKFIKPILEKMDGTEELLVKLNREDLLRKQRTFDNGSIPHQIHLGELHAILRRQEDFYPFLK
DNREKIEKILTFRIPYYVGPLARGNSRFAWMTRKSEETITPWNFEEVVDKGASAQSFIERMT
NFDKNLPNEKVLPKHSLLYEYFTVYNELTKVKYVTEGMRKPAFLSGEQKKAIVDLLFKTNRK
VTVKQLKEDYFKKIECFDSVEISGVEDRFNASLGAYHDLLKIIKDKDFLDNEENEDILEDIV
LTLTLFEDRGMIEERLKTYAHLFDDKVMKQLKRRRYTGWGRLSRKLINGIRDKQSGKTILDF
LKSDGFANRNFMQLIHDDSLTFKEDIQKAQVSGQGHSLHEQIANLAGSPAIKKGILQTVKIV
DELVKVMGHKPENIVIEMARENQTTQKGQKNSRERMKRIEEGIKELGSQILKEHPVENTQLQ
NEKLYLYYLQNGRDMYVDQELDINRLSDYDVDHIVPQSFIKDDSIDNKVLTRSDKNRGKSDN
VPSEEVVKKMKNYWRQLLNAKLITQRKFDNLTKAERGGLSELDKAGFIKRQLVETRQITKHV
AQILDSRMNTKYDENDKLIREVKVITLKSKLVSDFRKDFQFYKVREINNYHHAHDAYLNAVV
GTALIKKYPKLESEFVYGDYKVYDVRKMIAKSEQEIGKATAKYFFYSNIMNFFKTEITLANG
EIRKRPLIETNGETGEIVWDKGRDFATVRKVLSMPQVNIVKKTEVQTGGFSKESILPKRNSD
KLIARKKDWDPKKYGGFDSPTVAYSVLVVAKVEKGKSKKLKSVKELLGITIMERSSFEKNPI
DFLEAKGYKEVKKDLIIKLPKYSLFELENGRKRMLASAGELQKGNELALPSKYVNFLYLASH
YEKLKGSPEDNEQKQLFVEQHKHYLDEIIEQISEFSKRVILADANLDKVLSAYNKHRDKPIR
EQAENIIHLFTLTNLGAPAAFKYFDTTIDRKRYTSTKEVLDATLIHQSITGLYETRIDLSQL
GGD

(single underline: HNH domain; double underline: RuvC domain)

[0251] In some embodiments, wild type Cas9 corresponds to, or comprises the following nucleotide and/or amino acid sequences:

ATGGATAAAAAGTATTCTATTGGTTTAGACATCGGCACTAATTCCGTTGGATGGGCTGTCAT
AACCGATGAATACAAAGTACCTTCAAAGAAATTTAAGGTGTTGGGGAACACAGACCGTCATT
CGATTAAAAAGAATCTTATCGGTGCCCTCCTATTCGATAGTGGCGAAACGGCAGAGGCGACT
CGCCTGAAACGAACCGCTCGGAGAAGGTATACACGTCGCAAGAACCGAATATGTTACTTACA
AGAAATTTTTAGCAATGAGATGGCCAAAGTTGACGATTCTTTCTTTCACCGTTTGGAAGAGT
CCTTCCTTGTCGAAGAGGACAAGAAACATGAACGGCACCCCATCTTTGGAAACATAGTAGAT
GAGGTGGCATATCATGAAAAGTACCCAACGATTTATCACCTCAGAAAAAAGCTAGTTGACTC
AACTGATAAAGCGGACCTGAGGTTAATCTACTTGGCTCTTGCCCATATGATAAAGTTCCGTG
GGCACTTTCTCATTGAGGGTGATCTAAATCCGGACAACTCGGATGTCGACAAACTGTTCATC
CAGTTAGTACAAACCTATAATCAGTTGTTTGAAGAGAACCCTATAAATGCAAGTGGCGTGGA
TGCGAAGGCTATTCTTAGCGCCCGCCTCTCTAAATCCCGACGGCTAGAAAACCTGATCGCAC
AATTACCCGGAGAGAAGAAAAATGGGTTGTTCGGTAACCTTATAGCGCTCTCACTAGGCCTG
ACACCAAATTTTAAGTCGAACTTCGACTTAGCTGAAGATGCCAAATTGCAGCTTAGTAAGGA
CACGTACGATGACGATCTCGACAATCTACTGGCACAAATTGGAGATCAGTATGCGGACTTAT
TTTTGGCTGCCAAAAACCTTAGCGATGCAATCCTCCTATCTGACATACTGAGAGTTAATACT
GAGATTACCAAGGCGCCGTTATCCGCTTCAATGATCAAAAGGTACGATGAACATCACCAAGA
CTTGACACTTCTCAAGGCCCTAGTCCGTCAGCAACTGCCTGAGAAATATAAGGAAATATTCT
TTGATCAGTCGAAAAACGGGTACGCAGGTTATATTGACGGCGGAGCGAGTCAAGAGGAATTC
TACAAGTTTATCAAACCCATATTAGAGAAGATGGATGGGACGGAAGAGTTGCTTGTAAAACT
CAATCGCGAAGATCTACTGCGAAAGCAGCGGACTTTCGACAACGGTAGCATTCCACATCAAA
TCCACTTAGGCGAATTGCATGCTATACTTAGAAGGCAGGAGGATTTTTATCCGTTCCTCAAA
GACAATCGTGAAAAGATTGAGAAAATCCTAACCTTTCGCATACCTTACTATGTGGGACCCCT
GGCCCGAGGGAACTCTCGGTTCGCATGGATGACAAGAAAGTCCGAAGAAACGATTACTCCAT
GGAATTTTGAGGAAGTTGTCGATAAAGGTGCGTCAGCTCAATCGTTCATCGAGAGGATGACC
AACTTTGACAAGAATTTACCGAACGAAAAAGTATTGCCTAAGCACAGTTTACTTTACGAGTA
TTTCACAGTGTACAATGAACTCACGAAAGTTAAGTATGTCACTGAGGGCATGCGTAAACCCG
CCTTTCTAAGCGGAGAACAGAAGAAAGCAATAGTAGATCTGTTATTCAAGACCAACCGCAAA
GTGACAGTTAAGCAATTGAAAGAGGACTACTTTAAGAAAATTGAATGCTTCGATTCTGTCGA
GATCTCCGGGGTAGAAGATCGATTTAATGCGTCACTTGGTACGTATCATGACCTCCTAAAGA
TAATTAAAGATAAGGACTTCCTGGATAACGAAGAGAATGAAGATATCTTAGAAGATATAGTG
TTGACTCTTACCCTCTTTGAAGATCGGGAAATGATTGAGGAAAGACTAAAAACATACGCTCA
CCTGTTCGACGATAAGGTTATGAAACAGTTAAAGAGGCGTCGCTATACGGGCTGGGGACGAT
TGTCGCGGAAACTTATCAACGGGATAAGAGACAAGCAAAGTGGTAAAACTATTCTCGATTTT
CTAAAGAGCGACGGCTTCGCCAATAGGAACTTTATGCAGCTGATCCATGATGACTCTTTAAC
CTTCAAAGAGGATATACAAAAGGCACAGGTTTCCGGACAAGGGGACTCATTGCACGAACATA
TTGCGAATCTTGCTGGTTCGCCAGCCATCAAAAAGGGCATACTCCAGACAGTCAAAGTAGTG
GATGAGCTAGTTAAGGTCATGGGACGTCACAAACCGGAAAACATTGTAATCGAGATGGCACG
CGAAAATCAAACGACTCAGAAGGGGCAAAAAAACAGTCGAGAGCGGATGAAGAGAATAGAAG
AGGGTATTAAAGAACTGGGCAGCCAGATCTTAAAGGAGCATCCTGTGGAAAATACCCAATTG
CAGAACGAGAAACTTTACCTCTATTACCTACAAAATGGAAGGGACATGTATGTTGATCAGGA
ACTGGACATAAACCGTTTATCTGATTACGACGTCGATCACATTGTACCCCAATCCTTTTTGA
AGGACGATTCAATCGACAATAAAGTGCTTACACGCTCGGATAAGAACCGAGGGAAAAGTGAC
AATGTTCCAAGCGAGGAAGTCGTAAAGAAAATGAAGAACTATTGGCGGCAGCTCCTAAATGC
GAAACTGATAACGCAAAGAAAGTTCGATAACTTAACTAAAGCTGAGAGGGGTGGCTTGTCTG
AACTTGACAAGGCCGGATTTATTAAACGTCAGCTCGTGGAAACCCGCCAAATCACAAAGCAT
GTTGCACAGATACTAGATTCCCGAATGAATACGAAATACGACGAGAACGATAAGCTGATTCG
GGAAGTCAAAGTAATCACTTTAAAGTCAAAATTGGTGTCGGACTTCAGAAAGGATTTTCAAT
TCTATAAAGTTAGGGAGATAAATAACTACCACCATGCGCACGACGCTTATCTTAATGCCGTC
GTAGGGACCGCACTCATTAAGAAATACCCGAAGCTAGAAAGTGAGTTTGTGTATGGTGATTA
CAAAGTTTATGACGTCCGTAAGATGATCGCGAAAAGCGAACAGGAGATAGGCAAGGCTACAG
CCAAATACTTCTTTTATTCTAACATTATGAATTTCTTTAAGACGGAAATCACTCTGGCAAAC
GGAGAGATACGCAAACGACCTTTAATTGAAACCAATGGGGAGACAGGTGAAATCGTATGGGA
TAAGGGCCGGGACTTCGCGACGGTGAGAAAAGTTTTGTCCATGCCCCAAGTCAACATAGTAA
AGAAAACTGAGGTGCAGACCGGAGGGTTTTCAAAGGAATCGATTCTTCCAAAAAGGAATAGT
GATAAGCTCATCGCTCGTAAAAAGGACTGGGACCCGAAAAAGTACGGTGGCTTCGATAGCCC
TACAGTTGCCTATTCTGTCCTAGTAGTGGCAAAAGTTGAGAAGGGAAAATCCAAGAAACTGA
AGTCAGTCAAAGAATTATTGGGGATAACGATTATGGAGCGCTCGTCTTTTGAAAAGAACCCC
ATCGACTTCCTTGAGGCGAAAGGTTACAAGGAAGTAAAAAAGGATCTCATAATTAAACTACC
AAAGTATAGTCTGTTTGAGTTAGAAAATGGCCGAAAACGGATGTTGGCTAGCGCCGGAGAGC
TTCAAAAGGGGAACGAACTCGCACTACCGTCTAAATACGTGAATTTCCTGTATTTAGCGTCC
CATTACGAGAAGTTGAAAGGTTCACCTGAAGATAACGAACAGAAGCAACTTTTTGTTGAGCA
GCACAAACATTATCTCGACGAAATCATAGAGCAAATTTCGGAATTCAGTAAGAGAGTCATCC
TAGCTGATGCCAATCTGGACAAAGTATTAAGCGCATACAACAAGCACAGGGATAAACCCATA
CGTGAGCAGGCGGAAAATATTATCCATTTGTTTACTCTTACCAACCTCGGCGCTCCAGCCGC
ATTCAAGTATTTTGACACAACGATAGATCGCAAACGATACACTTCTACCAAGGAGGTGCTAG
ACGCGACACTGATTCACCAATCCATCACGGGATTATATGAAACTCGGATAGATTTGTCACAG
CTTGGGGGTGACGGATCCCCCAAGAAGAAGAGGAAAGTCTCGAGCGACTACAAAGACCATGA
CGGTGATTATAAAGATCATGACATCGATTACAAGGATGACGATGACAAGGCTGCAGGA
MDKKYSIGLAIGTNSVGWAVITDEYKVPSKKFKVLGNTDRHSIKKNLIGALLFDSGETAEAT
RLKRTARRRYTRRKNRICYLQEIFSNEMAKVDDSFFHRLEESFLVEEDKKHERHPIFGNIVD
EVAYHEKYPTIYHLRKKLVDSTDKADLRLIYLALAHMIKFRGHFLIEGDLNPDNSDVDKLFI
QLVQTYNQLFEENPINASGVDAKAILSARLSKSRRLENLIAQLPGEKKNGLFGNLIALSLGL
TPNFKSNFDLAEDAKLQLSKDTYDDDLDNLLAQIGDQYADLFLAAKNLSDAILLSDILRVNT
EITKAPLSASMIKRYDEHHQDLTLLKALVRQQLPEKYKEIFFDQSKNGYAGYIDGGASQEEF
YKFIKPILEKMDGTEELLVKLNREDLLRKQRTFDNGSIPHQIHLGELHAILRRQEDFYPFLK
DNREKIEKILTFRIPYYVGPLARGNSRFAWMTRKSEETITPWNFEEVVDKGASAQSFIERMT
NFDKNLPNEKVLPKHSLLYEYFTVYNELTKVKYVTEGMRKPAFLSGEQKKAIVDLLFKTNRK
VTVKQLKEDYFKKIECFDSVEISGVEDRFNASLGTYHDLLKIIKDKDFLDNEENEDILEDIV
LTLTLFEDREMIEERLKTYAHLFDDKVMKQLKRRRYTGWGRLSRKLINGIRDKQSGKTILDF
LKSDGFANRNFMQLIHDDSLTFKEDIQKAQVSGQGDSLHEHIANLAGSPAIKKGILQTVKVV
DELVKVMGRHKPENIVIEMARENQTTQKGQKNSRERMKRIEEGIKELGSQILKEHPVENTQL
QNEKLYLYYLQNGRDMYVDQELDINRLSDYDVDHIVPQSFLKDDSIDNKVLTRSDKNRGKSD
NVPSEEVVKKMKNYWRQLLNAKLITQRKFDNLTKAERGGLSELDKAGFIKRQLVETRQITKH
VAQILDSRMNTKYDENDKLIREVKVITLKSKLVSDFRKDFQFYKVREINNYHHAHDAYLNAV
VGTALIKKYPKLESEFVYGDYKVYDVRKMIAKSEQEIGKATAKYFFYSNIMNFFKTEITLAN
GEIRKRPLIETNGETGEIVWDKGRDFATVRKVLSMPQVNIVKKTEVQTGGFSKESILPKRNS
DKLIARKKDWDPKKYGGFDSPTVAYSVLVVAKVEKGKSKKLKSVKELLGITIMERSSFEKNP
IDFLEAKGYKEVKKDLIIKLPKYSLFELENGRKRMLASAGELQKGNELALPSKYVNFLYLAS
HYEKLKGSPEDNEQKQLFVEQHKHYLDEIIEQISEFSKRVILADANLDKVLSAYNKHRDKPI
REQAENIIHLFTLTNLGAPAAFKYFDTTIDRKRYTSTKEVLDATLIHQSITGLYETRIDLSQ
LGGD

(single underline: HNH domain; double underline: RuvC domain).

[0252] In some embodiments, wild type Cas9 corresponds to Cas9 from Streptococcus pyogenes (NCBI Reference Sequence: NC_002737.2 (nucleotide sequence as follows); and Uniprot Reference Sequence: Q99ZW2 (amino acid sequence as follows):

ATGGATAAGAAATACTCAATAGGCTTAGATATCGGCACAAATAGCGTCGGATGGGCGGTGAT
CACTGATGAATATAAGGTTCCGTCTAAAAAGTTCAAGGTTCTGGGAAATACAGACCGCCACA
GTATCAAAAAAAATCTTATAGGGGCTCTTTTATTTGACAGTGGAGAGACAGCGGAAGCGACT
CGTCTCAAACGGACAGCTCGTAGAAGGTATACACGTCGGAAGAATCGTATTTGTTATCTACA
GGAGATTTTTTCAAATGAGATGGCGAAAGTAGATGATAGTTTCTTTCATCGACTTGAAGAGT
CTTTTTTGGTGGAAGAAGACAAGAAGCATGAACGTCATCCTATTTTTGGAAATATAGTAGAT
GAAGTTGCTTATCATGAGAAATATCCAACTATCTATCATCTGCGAAAAAAATTGGTAGATTC
TACTGATAAAGCGGATTTGCGCTTAATCTATTTGGCCTTAGCGCATATGATTAAGTTTCGTG
GTCATTTTTTGATTGAGGGAGATTTAAATCCTGATAATAGTGATGTGGACAAACTATTTATC
CAGTTGGTACAAACCTACAATCAATTATTTGAAGAAAACCCTATTAACGCAAGTGGAGTAGA
TGCTAAAGCGATTCTTTCTGCACGATTGAGTAAATCAAGACGATTAGAAAATCTCATTGCTC
AGCTCCCCGGTGAGAAGAAAAATGGCTTATTTGGGAATCTCATTGCTTTGTCATTGGGTTTG
ACCCCTAATTTTAAATCAAATTTTGATTTGGCAGAAGATGCTAAATTACAGCTTTCAAAAGA
TACTTACGATGATGATTTAGATAATTTATTGGCGCAAATTGGAGATCAATATGCTGATTTGT
TTTTGGCAGCTAAGAATTTATCAGATGCTATTTTACTTTCAGATATCCTAAGAGTAAATACT
GAAATAACTAAGGCTCCCCTATCAGCTTCAATGATTAAACGCTACGATGAACATCATCAAGA
CTTGACTCTTTTAAAAGCTTTAGTTCGACAACAACTTCCAGAAAAGTATAAAGAAATCTTTT
TTGATCAATCAAAAAACGGATATGCAGGTTATATTGATGGGGGAGCTAGCCAAGAAGAATTT
TATAAATTTATCAAACCAATTTTAGAAAAAATGGATGGTACTGAGGAATTATTGGTGAAACT
AAATCGTGAAGATTTGCTGCGCAAGCAACGGACCTTTGACAACGGCTCTATTCCCCATCAAA
TTCACTTGGGTGAGCTGCATGCTATTTTGAGAAGACAAGAAGACTTTTATCCATTTTTAAAA
GACAATCGTGAGAAGATTGAAAAAATCTTGACTTTTCGAATTCCTTATTATGTTGGTCCATT
GGCGCGTGGCAATAGTCGTTTTGCATGGATGACTCGGAAGTCTGAAGAAACAATTACCCCAT
GGAATTTTGAAGAAGTTGTCGATAAAGGTGCTTCAGCTCAATCATTTATTGAACGCATGACA
AACTTTGATAAAAATCTTCCAAATGAAAAAGTACTACCAAAACATAGTTTGCTTTATGAGTA
TTTTACGGTTTATAACGAATTGACAAAGGTCAAATATGTTACTGAAGGAATGCGAAAACCAG
CATTTCTTTCAGGTGAACAGAAGAAAGCCATTGTTGATTTACTCTTCAAAACAAATCGAAAA
GTAACCGTTAAGCAATTAAAAGAAGATTATTTCAAAAAAATAGAATGTTTTGATAGTGTTGA
AATTTCAGGAGTTGAAGATAGATTTAATGCTTCATTAGGTACCTACCATGATTTGCTAAAAA
TTATTAAAGATAAAGATTTTTTGGATAATGAAGAAAATGAAGATATCTTAGAGGATATTGTT
TTAACATTGACCTTATTTGAAGATAGGGAGATGATTGAGGAAAGACTTAAAACATATGCTCA
CCTCTTTGATGATAAGGTGATGAAACAGCTTAAACGTCGCCGTTATACTGGTTGGGGACGTT
TGTCTCGAAAATTGATTAATGGTATTAGGGATAAGCAATCTGGCAAAACAATATTAGATTTT
TTGAAATCAGATGGTTTTGCCAATCGCAATTTTATGCAGCTGATCCATGATGATAGTTTGAC
ATTTAAAGAAGACATTCAAAAAGCACAAGTGTCTGGACAAGGCGATAGTTTACATGAACATA
TTGCAAATTTAGCTGGTAGCCCTGCTATTAAAAAAGGTATTTTACAGACTGTAAAAGTTGTT
GATGAATTGGTCAAAGTAATGGGGCGGCATAAGCCAGAAAATATCGTTATTGAAATGGCACG
TGAAAATCAGACAACTCAAAAGGGCCAGAAAAATTCGCGAGAGCGTATGAAACGAATCGAAG
AAGGTATCAAAGAATTAGGAAGTCAGATTCTTAAAGAGCATCCTGTTGAAAATACTCAATTG
CAAAATGAAAAGCTCTATCTCTATTATCTCCAAAATGGAAGAGACATGTATGTGGACCAAGA
ATTAGATATTAATCGTTTAAGTGATTATGATGTCGATCACATTGTTCCACAAAGTTTCCTTA
AAGACGATTCAATAGACAATAAGGTCTTAACGCGTTCTGATAAAAATCGTGGTAAATCGGAT
AACGTTCCAAGTGAAGAAGTAGTCAAAAAGATGAAAAACTATTGGAGACAACTTCTAAACGC
CAAGTTAATCACTCAACGTAAGTTTGATAATTTAACGAAAGCTGAACGTGGAGGTTTGAGTG
AACTTGATAAAGCTGGTTTTATCAAACGCCAATTGGTTGAAACTCGCCAAATCACTAAGCAT
GTGGCACAAATTTTGGATAGTCGCATGAATACTAAATACGATGAAAATGATAAACTTATTCG
AGAGGTTAAAGTGATTACCTTAAAATCTAAATTAGTTTCTGACTTCCGAAAAGATTTCCAAT
TCTATAAAGTACGTGAGATTAACAATTACCATCATGCCCATGATGCGTATCTAAATGCCGTC
GTTGGAACTGCTTTGATTAAGAAATATCCAAAACTTGAATCGGAGTTTGTCTATGGTGATTA
TAAAGTTTATGATGTTCGTAAAATGATTGCTAAGTCTGAGCAAGAAATAGGCAAAGCAACCG
CAAAATATTTCTTTTACTCTAATATCATGAACTTCTTCAAAACAGAAATTACACTTGCAAAT
GGAGAGATTCGCAAACGCCCTCTAATCGAAACTAATGGGGAAACTGGAGAAATTGTCTGGGA
TAAAGGGCGAGATTTTGCCACAGTGCGCAAAGTATTGTCCATGCCCCAAGTCAATATTGTCA
AGAAAACAGAAGTACAGACAGGCGGATTCTCCAAGGAGTCAATTTTACCAAAAAGAAATTCG
GACAAGCTTATTGCTCGTAAAAAAGACTGGGATCCAAAAAAATATGGTGGTTTTGATAGTCC
AACGGTAGCTTATTCAGTCCTAGTGGTTGCTAAGGTGGAAAAAGGGAAATCGAAGAAGTTAA
AATCCGTTAAAGAGTTACTAGGGATCACAATTATGGAAAGAAGTTCCTTTGAAAAAAATCCG
ATTGACTTTTTAGAAGCTAAAGGATATAAGGAAGTTAAAAAAGACTTAATCATTAAACTACC
TAAATATAGTCTTTTTGAGTTAGAAAACGGTCGTAAACGGATGCTGGCTAGTGCCGGAGAAT
TACAAAAAGGAAATGAGCTGGCTCTGCCAAGCAAATATGTGAATTTTTTATATTTAGCTAGT
CATTATGAAAAGTTGAAGGGTAGTCCAGAAGATAACGAACAAAAACAATTGTTTGTGGAGCA
GCATAAGCATTATTTAGATGAGATTATTGAGCAAATCAGTGAATTTTCTAAGCGTGTTATTT
TAGCAGATGCCAATTTAGATAAAGTTCTTAGTGCATATAACAAACATAGAGACAAACCAATA
CGTGAACAAGCAGAAAATATTATTCATTTATTTACGTTGACGAATCTTGGAGCTCCCGCTGC
TTTTAAATATTTTGATACAACAATTGATCGTAAACGATATACGTCTACAAAAGAAGTTTTAG
ATGCCACTCTTATCCATCAATCCATCACTGGTCTTTATGAAACACGCATTGATTTGAGTCAG
CTAGGAGGTGACTGA
MDKKYSIGLDIGTNSVGWAVITDEYKVPSKKFKVLGNTDRHSIKKNLIGALLFDSGETAEAT
RLKRTARRRYTRRKNRICYLQEIFSNEMAKVDDSFFHRLEESFLVEEDKKHERHPIFGNIVD
EVAYHEKYPTIYHLRKKLVDSTDKADLRLIYLALAHMIKFRGHFLIEGDLNPDNSDVDKLFI
QLVQTYNQLFEENPINASGVDAKAILSARLSKSRRLENLIAQLPGEKKNGLFGNLIALSLGL
TPNFKSNFDLAEDAKLQLSKDTYDDDLDNLLAQIGDQYADLFLAAKNLSDAILLSDILRVNT
EITKAPLSASMIKRYDEHHQDLTLLKALVRQQLPEKYKEIFFDQSKNGYAGYIDGGASQEEF
YKFIKPILEKMDGTEELLVKLNREDLLRKQRTFDNGSIPHQIHLGELHAILRRQEDFYPFLK
DNREKIEKILTFRIPYYVGPLARGNSRFAWMTRKSEETITPWNFEEVVDKGASAQSFIERMT
NFDKNLPNEKVLPKHSLLYEYFTVYNELTKVKYVTEGMRKPAFLSGEQKKAIVDLLFKTNRK
VTVKQLKEDYFKKIECFDSVEISGVEDRFNASLGTYHDLLKIIKDKDFLDNEENEDILEDIV
LTLTLFEDREMIEERLKTYAHLFDDKVMKQLKRRRYTGWGRLSRKLINGIRDKQSGKTILDF
LKSDGFANRNFMQLIHDDSLTFKEDIQKAQVSGQGDSLHEHIANLAGSPAIKKGILQTVKVV
DELVKVMGRHKPENIVIEMARENQTTQKGQKNSRERMKRIEEGIKELGSQILKEHPVENTQL
QNEKLYLYYLQNGRDMYVDQELDINRLSDYDVDHIVPQSFLKDDSIDNKVLTRSDKNRGKSD
NVPSEEVVKKMKNYWRQLLNAKLITQRKFDNLTKAERGGLSELDKAGFIKRQLVETRQITKH
VAQILDSRMNTKYDENDKLIREVKVITLKSKLVSDFRKDFQFYKVREINNYHHAHDAYLNAV
VGTALIKKYPKLESEFVYGDYKVYDVRKMIAKSEQEIGKATAKYFFYSNIMNFFKTEITLAN
GEIRKRPLIETNGETGEIVWDKGRDFATVRKVLSMPQVNIVKKTEVQTGGFSRESTLPKRNS
DKLIARKKDWDPKKYGGEDSPTVAYSVLVVAKVEKGKSKKLKSVKELLGITIMERSSFEKNP
IDFLEAKGYKEVKKDLIIKLPKYSLFELENGRKRMLASAGELQKGNELALPSKYVNFLYLAS
HYEKLKGSPEDNEQKQLFVEQHKHYLDEIIEQISEFSKRVILADANLDKVLSAYNKHRDKPI
REQAENIIHLFTLTNLGAPAAFKYFDTTIDRKRYTSTKEVLDATLIHQSITGLYETRIDLSQ
LGGD

(single underline: HNH domain; double underline: RuvC domain)

[0253] In some embodiments, Cas9 refers to Cas9 from: Corynebacterium ulcerans (NCBI Refs: NC_015683.1, NC_017317.1); Corynebacterium diphtheria (NCBI Refs: NC_016782.1, NC_016786.1); Spiroplasma syrphidicola (NCBI Ref: NC_021284.1); Prevotella intermedia (NCBI Ref: NC_017861.1); Spiroplasma taiwanense (NCBI Ref: NC_021846.1); Streptococcus iniae (NCBI Ref: NC_021314.1); Belliella baltica (NCBI Ref: NC_018010.1); Psychrojlexus torquisI (NCBI Ref: NC_018721.1); Streptococcus thermophilus (NCBI Ref: YP_820832.1), Listeria innocua (NCBI Ref: NP 472073.1), Campylobacter jejuni (NCBI Ref: YP_002344900.1) or Neisseria meningitidis (NCBI Ref: YP_002342100.1) or to a Cas9 from any other organism.

[0254] It should be appreciated that additional Cas9 proteins (e.g., a nuclease dead Cas9 (dCas9), a Cas9 nickase (nCas9), or a nuclease active Cas9), including variants and homologs thereof, are within the scope of this disclosure. Exemplary Cas9 proteins include, without limitation, those provided below. In some embodiments, the Cas9 protein is a nuclease dead Cas9 (dCas9). In some embodiments, the Cas9 protein is a Cas9 nickase (nCas9). In some embodiments, the Cas9 protein is a nuclease active Cas9.

[0255] In some embodiments, the Cas9 domain is a nuclease-inactive Cas9 domain (dCas9). For example, the dCas9 domain may bind to a duplexed nucleic acid molecule (e.g., via a gRNA molecule) without cleaving either strand of the duplexed nucleic acid molecule. In some embodiments, the nuclease-inactive dCas9 domain comprises a D10X mutation and a H840X mutation of the amino acid sequence set forth herein, or a corresponding mutation in any of the amino acid sequences provided herein, wherein X is any amino acid change. In some embodiments, the nuclease-inactive dCas9 domain comprises a D10A mutation and a H840A mutation of the amino acid sequence set forth herein, or a corresponding mutation in any of the amino acid sequences provided herein. As one example, a nuclease-inactive Cas9 domain comprises the amino acid sequence set forth in Cloning vector pPlatTET-gRNA2 (Accession No. BAV54124).

[0256] The amino acid sequence of an exemplary catalytically inactive Cas9 (dCas9) is as follows:

MDKKYSIGLAIGTNSVGWAVITDEYKVPSKKFKVLGNTDRHSIKKNLIGALLFDSGETAEAT
RLKRTARRRYTRRKNRICYLQEIFSNEMAKVDDSFFHRLEESFLVEEDKKHERHPIFGNIVD
EVAYHEKYPTIYHLRKKLVDSTDKADLRLIYLALAHMIKFRGHFLIEGDLNPDNSDVDKLFI
QLVQTYNQLFEENPINASGVDAKAILSARLSKSRRLENLIAQLPGEKKNGLFGNLIALSLGL
TPNFKSNFDLAEDAKLQLSKDTYDDDLDNLLAQIGDQYADLFLAAKNLSDAILLSDILRVNT
EITKAPLSASMIKRYDEHHQDLTLLKALVRQQLPEKYKEIFFDQSKNGYAGYIDGGASQEEF
YKFIKPILEKMDGTEELLVKLNREDLLRKQRTFDNGSIPHQIHLGELHAILRRQEDFYPFLK
DNREKIEKILTFRIPYYVGPLARGNSRFAWMTRKSEETITPWNFEEVVDKGASAQSFIERMT
NFDKNLPNEKVLPKHSLLYEYFTVYNELTKVKYVTEGMRKPAFLSGEQKKAIVDLLFKTNRK
VTVKQLKEDYFKKIECFDSVEISGVEDRFNASLGTYHDLLKIIKDKDFLDNEENEDILEDIV
LTLTLFEDREMIEERLKTYAHLFDDKVMKQLKRRRYTGWGRLSRKLINGIRDKQSGKTILDF
LKSDGFANRNFMQLIHDDSLTFKEDIQKAQVSGQGDSLHEHIANLAGSPAIKKGILQTVKVV
DELVKVMGRHKPENIVIEMARENQTTQKGQKNSRERMKRIEEGIKELGSQILKEHPVENTQL
QNEKLYLYYLQNGRDMYVDQELDINRLSDYDVDAIVPQSFLKDDSIDNKVLTRSDKNRGKSD
NVPSEEVVKKMKNYWRQLLNAKLITQRKFDNLTKAERGGLSELDKAGFIKRQLVETRQITKH
VAQILDSRMNTKYDENDKLIREVKVITLKSKLVSDFRKDFQFYKVREINNYHHAHDAYLNAV
VGTALIKKYPKLESEFVYGDYKVYDVRKMIAKSEQEIGKATAKYFFYSNIMNFFKTEITLAN
GEIRKRPLIETNGETGEIVWDKGRDFATVRKVLSMPQVNIVKKTEVQTGGFSKESILPKRNS
DKLIARKKDWDPKKYGGFDSPTVAYSVLVVAKVEKGKSKKLKSVKELLGITIMERSSFEKNP
IDFLEAKGYKEVKKDLIIKLPKYSLFELENGRKRMLASAGELQKGNELALPSKYVNFLYLAS
HYEKLKGSPEDNEQKQLFVEQHKHYLDEIIEQISEFSKRVILADANLDKVLSAYNKHRDKPI
REQAENIIHLFTLTNLGAPAAFKYFDTTIDRKRYTSTKEVLDATLIHQSITGLYETRIDLSQ
LGGD

(see, e.g., Qi et al., “Repurposing CRISPR as an RNA-guided platform for sequence-specific control of gene expression.” Cell. 2013; 152(5):1173-83, the entire contents of which are incorporated herein by reference).

[0257] Additional suitable nuclease-inactive dCas9 domains will be apparent to those of skill in the art based on this disclosure and knowledge in the field, and are within the scope of this disclosure. Such additional exemplary suitable nuclease-inactive Cas9 domains include, but are not limited to, D10A/H840A, D10A/D839A/H840A, and D10A/D839A/H840A/N863A mutant domains (See, e.g., Prashant et al., CAS9 transcriptional activators for target specificity screening and paired nickases for cooperative genome engineering. Nature Biotechnology. 2013; 31(9): 833-838, the entire contents of which are incorporated herein by reference).

[0258] In some embodiments, a Cas9 nuclease has an inactive (e.g., an inactivated) DNA cleavage domain, that is, the Cas9 is a nickase, referred to as an “nCas9” protein (for “nickase” Cas9). A nuclease-inactivated Cas9 protein may interchangeably be referred to as a “dCas9” protein (for nuclease-“dead” Cas9) or catalytically inactive Cas9. Methods for generating a Cas9 protein (or a fragment thereof) having an inactive DNA cleavage domain are known (See, e.g., Jinek et al., Science. 337:816-821(2012); Qi et al., “Repurposing CRISPR as an RNA-Guided Platform for Sequence-Specific Control of Gene Expression” (2013) Cell. 28; 152(5):1173-83, the entire contents of each of which are incorporated herein by reference). For example, the DNA cleavage domain of Cas9 is known to include two subdomains, the HNH nuclease subdomain and the RuvC1 subdomain. The HNH subdomain cleaves the strand complementary to the gRNA, whereas the RuvC1 subdomain cleaves the non-complementary strand. Mutations within these subdomains can silence the nuclease activity of Cas9. For example, the mutations D10A and H840A completely inactivate the nuclease activity of S. pyogenes Cas9 (Jinek et al., Science. 337:816-821(2012); Qi et al., Cell. 28; 152(5):1173-83 (2013)).

[0259] In some embodiments, the dCas9 domain comprises an amino acid sequence that is at least 60%, at least 65%, at least 70%, at least 75%, at least 80%, at least 85%, at least 90%, at least 95%, at least 96%, at least 97%, at least 98%, at least 99%, or at least 99.5% identical to any one of the dCas9 domains provided herein. In some embodiments, the Cas9 domain comprises an amino acid sequences that has 1, 2, 3, 4, 5, 6, 7, 8, 9, 10, 11, 12, 13, 14, 15, 16, 17, 18, 19, 20, 21, 22, 23, 24, 25, 26, 27, 28, 29, 30, 31, 32, 33, 34, 35, 36, 37, 38, 39, 40, 41, 42, 43, 44, 45, 46, 47, 48, 49, 50 or more or more mutations compared to any one of the amino acid sequences set forth herein. In some embodiments, the Cas9 domain comprises an amino acid sequence that has at least 10, at least 15, at least 20, at least 30, at least 40, at least 50, at least 60, at least 70, at least 80, at least 90, at least 100, at least 150, at least 200, at least 250, at least 300, at least 350, at least 400, at least 500, at least 600, at least 700, at least 800, at least 900, at least 1000, at least 1100, or at least 1200 identical contiguous amino acid residues as compared to any one of the amino acid sequences set forth herein.

[0260] In some embodiments, dCas9 corresponds to, or comprises in part or in whole, a Cas9 amino acid sequence having one or more mutations that inactivate the Cas9 nuclease activity. In some embodiments, the nuclease-inactive dCas9 domain comprises a D10X mutation and a H840X mutation of the amino acid sequence set forth herein, or a corresponding mutation in any of the amino acid sequences provided herein, wherein X is any amino acid change. In some embodiments, the nuclease-inactive dCas9 domain comprises a D10A mutation and a H840A mutation of the amino acid sequence set forth herein, or a corresponding mutation in any of the amino acid sequences provided herein. In some embodiments, a nuclease-inactive Cas9 domain comprises the amino acid sequence set forth in Cloning vector pPlatTET-gRNA2 (Accession No. BAV54124).

[0261] In some embodiments, the dCas9 comprises the amino acid sequence of dCas9 (D10A and H840A):

MDKKYSIGLAIGTNSVGWAVITDEYKVPSKKFKVLGNTDRHSIKKNLIGA
LLFDSGETAEATRLKRTARRRYTRRKNRICYLQEIFSNEMAKVDDSFFHR
LEESFLVEEDKKHERHPIFGNIVDEVAYHEKYPTIYHLRKKLVDSTDKAD
LRLIYLALAHMIKFRGHFLIEGDLNPDNSDVDKLFIQLVQTYNQLFEENP
INASGVDAKAILSARLSKSRRLENLIAQLPGEKKNGLFGNLIALSLGLTP
NFKSNFDLAEDAKLQLSKDTYDDDLDNLLAQIGDQYADLFLAAKNLSDAI
LLSDILRVNTEITKAPLSASMIKRYDEHHQDLTLLKALVRQQLPEKYKEI
FFDQSKNGYAGYIDGGASQEEFYKFIKPILEKMDGTEELLVKLNREDLLR
KQRTFDNGSIPHQIHLGELHAILRRQEDFYPFLKDNREKIEKILTFRIPY
YVGPLARGNSRFAWMTRKSEETITPWNFEEVVDKGASAQSFIERMTNFDK
NLPNEKVLPKHSLLYEYFTVYNELTKVKYVTEGMRKPAFLSGEQKKAIVD
LLFKTNRKVTVKQLKEDYFKKIECFDSVEISGVEDRFNASLGTYHDLLKI
IKDKDFLDNEENEDILEDIVLTLTLFEDREMIEERLKTYAHLFDDKVMKQ
LKRRRYTGWGRLSRKLINGIRDKQSGKTILDFLKSDGFANRNFMQLIHDD
SLTFKEDIQKAQVSGQGDSLHEHIANLAGSPAIKKGILQTVKVVDELVKV
MGRHKPENIVIEMARENQTTQKGQKNSRERMKRIEEGIKELGSQILKEHP
VENTQLQNEKLYLYYLQNGRDMYVDQELDINRLSDYDVDAIVPQSFLKDD
SIDNKVLTRSDKNRGKSDNVPSEEVVKKMKNYWRQLLNAKLITQRKFDNL
TKAERGGLSELDKAGFIKRQLVETRQITKHVAQILDSRMNTKYDENDKLI
REVKVITLKSKLVSDFRKDFQFYKVREINNYHHAHDAYLNAVVGTALIKK
YPKLESEFVYGDYKVYDVRKMIAKSEQEIGKATAKYFFYSNIMNFFKTEI
TLANGEIRKRPLIETNGETGEIVWDKGRDFATVRKVLSMPQVNIVKKTEV
QTGGFSKESILPKRNSDKLIARKKDWDPKKYGGFDSPTVAYSVLVVAKVE
KGKSKKLKSVKELLGITIMERSSFEKNPIDFLEAKGYKEVKKDLIIKLPK
YSLFELENGRKRMLASAGELQKGNELALPSKYVNFLYLASHYEKLKGSPE
DNEQKQLFVEQHKHYLDEIIEQISEFSKRVILADANLDKVLSAYNKHRDK
PIREQAENIIHLFTLTNLGAPAAFKYFDTTIDRKRYTSTKEVLDATLIHQ
SITGLYETRIDLSQLGGD (single underline: HNH domain;
double underline: RuvC domain).

[0262] In some embodiments, the amino acid sequence of an exemplary catalytically inactive Cas9 (dCas9) is as follows:

MDKKYSIGLAIGTNSVGWAVITDEYKVPSKKFKVLGNTDRHSIKKNLIGA
LLFDSGETAEATRLKRTARRRYTRRKNRICYLQEIFSNEMAKVDDSFFHR
LEESFLVEEDKKHERHPIFGNIVDEVAYHEKYPTIYHLRKKLVDSTDKAD
LRLIYLALAHMIKFRGHFLIEGDLNPDNSDVDKLEIQLVQTYNQLFEENP
INASGVDAKAILSARLSKSRRLENLIAQLPGEKKNGLFGNLIALSLGLTP
NFKSNFDLAEDAKLQLSKDTYDDDLDNLLAQIGDQYADLFLAAKNLSDAI
LLSDILRVNTEITKAPLSASMIKRYDEHHQDLTLLKALVRQQLPEKYKEI
FFDQSKNGYAGYIDGGASQEEFYKFIKPILEKMDGTEELLVKLNREDLLR
KQRTFDNGSIPHQIHLGELHAILRRQEDFYPFLKDNREKIEKILTFRIPY
YVGPLARGNSRFAWMTRKSEETITPWNFEEVVDKGASAQSFIERMTNFDK
NLPNEKVLPKHSLLYEYFTVYNELTKVKYVTEGMRKPAFLSGEQKKAIVD
LLFKTNRKVTVKQLKEDYFKKIECFDSVEISGVEDRFNASLGTYHDLLKI
IKDKDFLDNEENEDILEDIVLTLTLFEDREMIEERLKTYAHLFDDKVMKQ
LKRRRYTGWGRLSRKLINGIRDKQSGKTILDFLKSDGFANRNFMQLIHDD
SLTFKEDIQKAQVSGQGDSLHEHIANLAGSPAIKKGILQTVKVVDELVKV
MGRHKPENIVIEMARENQTTQKGQKNSRERMKRIEEGIKELGSQILKEHP
VENTQLQNEKLYLYYLQNGRDMYVDQELDINRLSDYDVDAIVPQSFLKDD
SIDNKVLTRSDKNRGKSDNVPSEEVVKKMKNYWRQLLNAKLITQRKFDNL
TKAERGGLSELDKAGFIKRQLVETRQITKHVAQILDSRMNTKYDENDKLI
REVKVITLKSKLVSDFRKDFQFYKVREINNYHHAHDAYLNAVVGTALIKK
YPKLESEFVYGDYKVYDVRKMIAKSEQEIGKATAKYFFYSNIMNFFKTEI
TLANGEIRKRPLIETNGETGEIVWDKGRDFATVRKVLSMPQVNIVKKTEV
QTGGFSKESILPKRNSDKLIARKKDWDPKKYGGFDSPTVAYSVLVVAKVE
KGKSKKLKSVKELLGITIMERSSFEKNPIDFLEAKGYKEVKKDLIIKLPK
YSLFELENGRKRMLASAGELQKGNELALPSKYVNFLYLASHYEKLKGSPE
DNEQKQLFVEQHKHYLDEIIEQISEFSKRVILADANLDKVLSAYNKHRDK
PIREQAENIIHLFTLTNLGAPAAFKYFDTTIDRKRYTSTKEVLDATLIHQ
SITGLYETRIDLSQLGGD

(see, e.g., Qi et al., “Repurposing CRISPR as an RNA-guided platform for sequence-specific control of gene expression.” Cell. 2013; 152(5):1173-83, the entire contents of which are incorporated herein by reference).

[0263] In some embodiments, the amino acid sequence of an exemplary catalytically inactive Cas9 (dCas9) is as follows:

MDKKYSIGLAIGTNSVGWAVITDEYKVPSKKFKVLGNTDRHSIKKNLIGA
LLFDSGETAEATRLKRTARRRYTRRKNRICYLQEIFSNEMAKVDDSFFHR
LEESFLVEEDKKHERHPIFGNIVDEVAYHEKYPTIYHLRKKLVDSTDKAD
LRLIYLALAHMIKFRGHFLIEGDLNPDNSDVDKLFIQLVQTYNQLFEENP
INASGVDAKAILSARLSKSRRLENLIAQLPGEKKNGLFGNLIALSLGLTP
NFKSNFDLAEDAKLQLSKDTYDDDLDNLLAQIGDQYADLFLAAKNLSDAI
LLSDILRVNTEITKAPLSASMIKRYDEHHQDLTLLKALVRQQLPEKYKEI
FFDQSKNGYAGYIDGGASQEEFYKFIKPILEKMDGTEELLVKLNREDLLR
KQRTFDNGSIPHQIHLGELHAILRRQEDFYPFLKDNREKIEKILTFRIPY
YVGPLARGNSRFAWMTRKSEETITPWNFEEVVDKGASAQSFIERMTNFDK
NLPNEKVLPKHSLLYEYETVYNELTKVKYVTEGMRKPAFLSGEQKKAIVD
LLFKTNRKVTVKQLKEDYFKKIECFDSVEISGVEDRFNASLGTYHDLLKI
IKDKDFLDNEENEDILEDIVLTLTLFEDREMIEERLKTYAHLFDDKVMKQ
LKRRRYTGWGRLSRKLINGIRDKQSGKTILDFLKSDGFANRNFMQLIHDD
SLTFKEDIQKAQVSGQGDSLHEHIANLAGSPAIKKGILQTVKVVDELVKV
MGRHKPENIVIEMARENQTTQKGQKNSRERMKRIEEGIKELGSQILKEHP
VENTQLQNEKLYLYYLQNGRDMYVDQELDINRLSDYDVDAIVPQSFLKDD
SIDNKVLTRSDKNRGKSDNVPSEEVVKKMKNYWRQLLNAKLITQRKFDNL
TKAERGGLSELDKAGFIKRQLVETRQITKHVAQILDSRMNTKYDENDKLI
REVKVITLKSKLVSDFRKDFQFYKVREINNYHHAHDAYLNAVVGTALIKK
YPKLESEFVYGDYKVYDVRKMIAKSEQEIGKATAKYFFYSNIMNFFKTEI
TLANGEIRKRPLIETNGETGEIVWDKGRDFATVRKVLSMPQVNIVKKTEV
QTGGFSKESILPKRNSDKLIARKKDWDPKKYGGFDSPTVAYSVLVVAKVE
KGKSKKLKSVKELLGITIMERSSFEKNPIDFLEAKGYKEVKKDLIIKLPK
YSLFELENGRKRMLASAGELQKGNELALPSKYVNFLYLASHYEKLKGSPE
DNEQKQLFVEQHKHYLDEIIEQISEFSKRVILADANLDKVLSAYNKHRDK
PIREQAENIIHLFTLTNLGAPAAFKYFDTTIDRKRYTSTKEVLDATLIHQ
SITGLYETRIDLSQLGGD

[0264] In some embodiments, the Cas9 domain comprises a D10A mutation, while the residue at position 840 remains a histidine in the amino acid sequence provided above, or at corresponding positions in any of the amino acid sequences provided herein.

[0265] In other embodiments, dCas9 variants having mutations other than D10A and H840A are provided, which, e.g., result in nuclease inactivated Cas9 (dCas9). Such mutations, by way of example, include other amino acid substitutions at D10 and H840, or other substitutions within the nuclease domains of Cas9 (e.g., substitutions in the HNH nuclease subdomain and/or the RuvC1 subdomain). In some embodiments, variants or homologues of dCas9 are provided which are at least about 70% identical, at least about 80% identical, at least about 90% identical, at least about 95% identical, at least about 98% identical, at least about 99% identical, at least about 99.5% identical, or at least about 99.9% identical. In some embodiments, variants of dCas9 are provided having amino acid sequences which are shorter, or longer, by about 5 amino acids, by about 10 amino acids, by about 15 amino acids, by about 20 amino acids, by about 25 amino acids, by about 30 amino acids, by about 40 amino acids, by about 50 amino acids, by about 75 amino acids, by about 100 amino acids or more.

[0266] Additional suitable nuclease-inactive dCas9 domains will be apparent to those of skill in the art based on this disclosure and knowledge in the field, and are within the scope of this disclosure. Such additional exemplary suitable nuclease-inactive Cas9 domains include, but are not limited to, D10A/H840A, D10A/D839A/H840A, and D10A/D839A/H840A/N863A mutant domains (See, e.g., Prashant et al., CAS9 transcriptional activators for target specificity screening and paired nickases for cooperative genome engineering. Nature Biotechnology. 2013; 31(9): 833-838, the entire contents of which are incorporated herein by reference).

[0267] In some embodiments, the Cas9 domain is a Cas9 nickase. The Cas9 nickase may be a Cas9 protein that is capable of cleaving only one strand of a duplexed nucleic acid molecule (e.g., a duplexed DNA molecule). In some embodiments, the Cas9 nickase cleaves the target strand of a duplexed nucleic acid molecule, meaning that the Cas9 nickase cleaves the strand that is base paired to (complementary to) a gRNA (e.g., an sgRNA) that is bound to the Cas9. In some embodiments, a Cas9 nickase comprises a D10A mutation and has a histidine at position 840. In some embodiments, the Cas9 nickase cleaves the non-target, non-base-edited strand of a duplexed nucleic acid molecule, meaning that the Cas9 nickase cleaves the strand that is not base paired to a gRNA (e.g., an sgRNA) that is bound to the Cas9. In some embodiments, a Cas9 nickase comprises an H840A mutation and has an aspartic acid residue at position 10, or a corresponding mutation. In some embodiments, the Cas9 nickase comprises an amino acid sequence that is at least 60%, at least 65%, at least 70%, at least 75%, at least 80%, at least 85%, at least 90%, at least 95%, at least 96%, at least 97%, at least 98%, at least 99%, or at least 99.5% identical to any one of the Cas9 nickases provided herein. Additional suitable Cas9 nickases will be apparent to those of skill in the art based on this disclosure and knowledge in the field, and are within the scope of this disclosure.

[0268] The amino acid sequence of an exemplary catalytically Cas9 nickase (nCas9) is as follows:

MDKKYSIGLAIGTNSVGWAVITDEYKVPSKKFKVLGNTDRHSIKKNLIGA
LLFDSGETAEATRLKRTARRRYTRRKNRICYLQEIFSNEMAKVDDSFFHR
LEESFLVEEDKKHERHPIFGNIVDEVAYHEKYPTIYHLRKKLVDSTDKAD
LRLIYLALAHMIKFRGHFLIEGDLNPDNSDVDKLFIQLVQTYNQLFEENP
INASGVDAKAILSARLSKSRRLENLIAQLPGEKKNGLFGNLIALSLGLTP
NFKSNFDLAEDAKLQLSKDTYDDDLDNLLAQIGDQYADLFLAAKNLSDAI
LLSDILRVNTEITKAPLSASMIKRYDEHHQDLTLLKALVRQQLPEKYKEI
FFDQSKNGYAGYIDGGASQEEFYKFIKPILEKMDGTEELLVKLNREDLLR
KQRTFDNGSIPHQIHLGELHAILRRQEDFYPFLKDNREKIEKILTFRIPY
YVGPLARGNSRFAWMTRKSEETITPWNFEEVVDKGASAQSFIERMTNFDK
NLPNEKVLPKHSLLYEYFTVYNELTKVKYVTEGMRKPAFLSGEQKKAIVD
LLFKTNRKVTVKQLKEDYFKKIECFDSVEISGVEDRFNASLGTYHDLLKI
IKDKDFLDNEENEDILEDIVLTLTLFEDREMIEERLKTYAHLFDDKVMKQ
LKRRRYTGWGRLSRKLINGIRDKQSGKTILDFLKSDGFANRNEMQLIHDD
SLTFKEDIQKAQVSGQGDSLHEHIANLAGSPAIKKGILQTVKVVDELVKV
MGRHKPENIVIEMARENQTTQKGQKNSRERMKRIEEGIKELGSQILKEHP
VENTQLQNEKLYLYYLQNGRDMYVDQELDINRLSDYDVDHIVPQSFLKDD
SIDNKVLTRSDKNRGKSDNVPSEEVVKKMKNYWRQLLNAKLITQRKFDNL
TKAERGGLSELDKAGFIKRQLVETRQITKHVAQILDSRMNTKYDENDKLI
REVKVITLKSKLVSDFRKDFQFYKVREINNYHHAHDAYLNAVVGTALIKK
YPKLESEFVYGDYKVYDVRKMIAKSEQEIGKATAKYFFYSNIMNFFKTEI
TLANGEIRKRPLIETNGETGEIVWDKGRDFATVRKVLSMPQVNIVKKTEV
QTGGFSKESILPKRNSDKLIARKKDWDPKKYGGFDSPTVAYSVLVVAKVE
KGKSKKLKSVKELLGITIMERSSFEKNPIDFLEAKGYKEVKKDLIIKLPK
YSLFELENGRKRMLASAGELQKGNELALPSKYVNFLYLASHYEKLKGSPE
DNEQKQLFVEQHKHYLDEIIEQISEFSKRVILADANLDKVLSAYNKHRDK
PIREQAENIIHLFTLTNLGAPAAFKYFDTTIDRKRYTSTKEVLDATLIHQ
SITGLYETRIDLSQLGGD

[0269] In some embodiments, Cas9 refers to a Cas9 from archaea (e.g., nanoarchaea), which constitute a domain and kingdom of single-celled prokaryotic microbes. In some embodiments, the programmable nucleotide binding protein may be a CasX or CasY protein, which have been described in, for example, Burstein et al., “New CRISPR-Cas systems from uncultivated microbes.” Cell Res. 2017 Feb. 21. doi: 10.1038/cr.2017.21, the entire contents of which is hereby incorporated by reference. Using genome-resolved metagenomics, a number of CRISPR-Cas systems were identified, including the first reported Cas9 in the archaeal domain of life. This divergent Cas9 protein was found in little-studied nanoarchaea as part of an active CRISPR-Cas system. In bacteria, two previously unknown systems were discovered, CRISPR-CasX and CRISPR-CasY, which are among the most compact systems yet discovered. In some embodiments, in a base editor system described herein Cas9 is replaced by CasX, or a variant of CasX. In some embodiments, in a base editor system described herein Cas9 is replaced by CasY, or a variant of CasY. It should be appreciated that other RNA-guided DNA binding proteins may be used as a nucleic acid programmable DNA binding protein (napDNAbp), and are within the scope of this disclosure.

[0270] In some embodiments, the nucleic acid programmable DNA binding protein (napDNAbp) of any of the fusion proteins provided herein may be a CasX or CasY protein. In some embodiments, the napDNAbp is a CasX protein. In some embodiments, the napDNAbp is a CasY protein. In some embodiments, the napDNAbp comprises an amino acid sequence that is at least 85%, at least 90%, at least 91%, at least 92%, at least 93%, at least 94%, at least 95%, at least 96%, at least 97%, at least 98%, at least 99%, or at ease 99.5% identical to a naturally-occurring CasX or CasY protein. In some embodiments, the programmable nucleotide binding protein is a naturally-occurring CasX or CasY protein. In some embodiments, the programmable nucleotide binding protein comprises an amino acid sequence that is at least 85%, at least 90%, at least 91%, at least 92%, at least 93%, at least 94%, at least 95%, at least 96%, at least 97%, at least 98%, at least 99%, or at ease 99.5% identical to any CasX or CasY protein described herein. It should be appreciated that CasX and CasY from other bacterial species may also be used in accordance with the present disclosure.

[0271] An exemplary CasX ((uniprot.org/uniprot/FONN87; uniprot.org/uniprot/F0NH53) tr|F0NN87|F0NN87_SULIHCRISPR-associatedCasx protein OS=Sulfolobus islandicus (strain HVE10/4) GN=SiH_0402 PE=4 SV=1) amino acid sequence is as follows:

MEVPLYNIFGDNYIIQVATEAENSTIYNNKVEIDDEELRNVLNLAYKIAK
NNEDAAAERRGKAKKKKGEEGETTTSNIILPLSGNDKNPWTETLKCYNFP
TTVALSEVFKNFSQVKECEEVSAPSFVKPEFYEFGRSPGMVERTRRVKLE
VEPHYLIIAAAGWVLTRLGKAKVSEGDYVGVNVFTPTRGILYSLIQNVNG
IVPGIKPETAFGLWIARKVVSSVTNPNVSVVRIYTISDAVGQNPTTINGG
FSIDLTKLLEKRYLLSERLEAIARNALSISSNMRERYIVLANYIYEYLTG
SKRLEDLLYFANRDLIMNLNSDDGKVRDLKLISAYVNGELIRGEG.

[0272] An exemplary CasX (>tr|F0NH531F0NH53_SULIR CRISPR associated protein, Casx OS=Sulfolobus islandicus (strain REY15A) GN=SiRe_0771 PE=4 SV=1) amino acid sequence is as follows:

MEVPLYNIFGDNYIIQVATEAENSTIYNNKVEIDDEELRNVLNLAYKIAK
NNEDAAAERRGKAKKKKGEEGETTTSNIILPLSGNDKNPWTETLKCYNFP
TTVALSEVFKNFSQVKECEEVSAPSFVKPEFYKFGRSPGMVERTRRVKLE
VEPHYLIMAAAGWVLTRLGKAKVSEGDYVGVNVFTPTRGILYSLIQNVNG
IVPGIKPETAFGLWIARKVVSSVTNPNVSVVSIYTISDAVGQNPTTINGG
FSIDLTKLLEKRDLLSERLEAIARNALSISSNMRERYIVLANYIYEYLTG
SKRLEDLLYFANRDLIMNLNSDDGKVRDLKLISAYVNGELIRGEG.

[0273] Deltaproteobacteria CasX

MEKRINKIRKKLSADNATKPVSRSGPMKTLLVRVMTDDLKKRLEKRRKKP
EVMPQVISNNAANNLRMLLDDYTKMKEAILQVYWQEFKDDHVGLMCKFAQ
PASKKIDQNKLKPEMDEKGNLTTAGFACSQCGQPLFVYKLEQVSEKGKAY
TNYFGRCNVAEHEKLILLAQLKPVKDSDEAVTYSLGKFGQRALDFYSIHV
TKESTHPVKPLAQIAGNRYASGPVGKALSDACMGTIASFLSKYQDIIIEH
QKVVKGNQKRLESLRELAGKENLEYPSVTLPPQPHTKEGVDfAYNEVIAR
VRMWVNLNLWQKLKLSRDDAKPLLRLKGFPSFPVVERRENEVDWWNTINE
VKKLIDAKRDMGRVFWSGVTAEKRNTILEGYNYLPNENDHKKREGSLENP
KKPAKRQFGDLLLYLEKKYAGDWGKVFDEAWERIDKKIAGLTSHIEREEA
RNAEDAQSKAVLTDWLRAKASFVLERLKEMDEKEFYACEIQLQKWYGDLR
GNPFAVEAENRVVDISGFSIGSDGHSIQYRNLLAWKYLENGKREEYLLMN
YGKKGRIRFTDGTDIKKSGKWQGLLYGGGKAKVIDLTFDPDDEQLIILPL
AFGTRQGREFIWNDLLSLETGLIKLANGRVIEKTIYNKKIGRDEPALFVA
LTFERREVVDPSNIKPVNLIGVARGENIPAVIALTDPEGCPLPEFKDSSG
GPTDILRIGEGYKEKQRAIQAAKEVEQRRAGGYSRKFASKSRNLADDMVR
NSARDLFYHAVTHDAVLVFANLSRGFGRQGKRTFMTERQYTKMEDWLTAK
LAYEGLTSKTYLSKTLAQYTSKTCSNCGFTITYADMDVMLVRLKKTSDGW
ATTLNNKELKAEYQITYYNRYKRQTVEKELSAELDRLSEESGNNDISKWT
KGRRDEALFLLKKRFSHRPVQEQFVCLDCGHEVHAAEQAALNIARSWLFL
NSNSTEFKSYKSGKQPFVGAWQAFYKRRLKEVWKPNA

[0274] An exemplary CasY ((ncbi.nlm.nih.gov/protein/APG80656.1)>APG80656.1 CRISPR-associated protein CasY [uncultured Parcubacteria group bacterium]) amino acid sequence is as follows:

MSKRHPRISGVKGYRLHAQRLEYTGKSGAMRTIKYPLYSSPSGGRTVPRE
IVSAINDDYVGLYGLSNFDDLYNAEKRNEEKVYSVLDFWYDCVQYGAVFS
YTAPGLLKNVAEVRGGSYELTKTLKGSHLYDELQIDKVIKFLNKKEISRA
NGSLDKLKKDIIDCFKAEYRERHKDQCNKLADDIKNAKKDAGASLGERQK
KLFRDFFGISEQSENDKPSFTNPLNLTCCLLPFDTVNNNRNRGEVLFNKL
KEYAQKLDKNEGSLEMWEYIGIGNSGTAFSNFLGEGFLGRLRENKITELK
KAMMDITDAWRGQEQEEELEKRLRILAALTIKLREPKFDNHWGGYRSDIN
GKLSSWLQNYINQTVKIKEDLKGHKKDLKKAKEMINRFGESDTKEEAVVS
SLLESIEKIVPDDSADDEKPDIPAIAIYRRFLSDGRLTLNRFVQREDVQE
ALIKERLEAEKKKKPKKRKKKSDAEDEKETIDFKELFPHLAKPLKLVPNF
YGDSKRELYKKYKNAAIYTDALWKAVEKIYKSAFSSSLKNSFFDTDFDKD
FFIKRLQKIFSVYRRFNTDKWKPIVKNSFAPYCDIVSLAENEVLYKPKQS
RSRKSAAIDKNRVRLPSTENIAKAGIALARELSVAGFDWKDLLKKEEHEE
YIDLIELHKTALALLLAVTETQLDISALDFVENGTVKDFMKTRDGNLVLE
GRFLEMFSQSIVFSELRGLAGLMSRKEFITRSAIQTMNGKQAELLYIPHE
FQSAKITTPKEMSRAFLDLAPAEFATSLEPESLSEKSLLKLKQMRYYPHY
FGYELTRTGQGIDGGVAENALRLEKSPVKKREIKCKQYKTLGRGQNKIVL
YVRSSYYQTQFLEWFLHRPKNVQTDVAVSGSFLIDEKKVKTRWNYDALTV
ALEPVSGSERVFVSQPFTIFPEKSAEEEGQRYLGIDIGEYGIAYTALEIT
GDSAKILDQNFISDPQLKTLREEVKGLKLDQRRGTFAMPSTKIARIRESL
VHSLRNRIHHLALKHKAKIVYELEVSRFEEGKQKIKKVYATLKKADVYSE
IDADKNLQTTVWGKLAVASEISASYTSQFCGACKKLWRAEMQVDETITTQ
ELIGTVRVIKGGTLIDAIKDFMRPPIFDENDTPFPKYRDFCDKHHISKKM
RGNSCLFICPFCRANADADIQASQTIALLRYVKEEKKVEDYFERFRKLKN
IKVLGQMKKI.

[0275] The Cas9 nuclease has two functional endonuclease domains: RuvC and HNH. Cas9 undergoes a conformational change upon target binding that positions the nuclease domains to cleave opposite strands of the target DNA. The end result of Cas9-mediated DNA cleavage is a double-strand break (DSB) within the target DNA (˜3-4 nucleotides upstream of the PAM sequence). The resulting DSB is then repaired by one of two general repair pathways: (1) the efficient but error-prone non-homologous end joining (NHEJ) pathway; or (2) the less efficient but high-fidelity homology directed repair (HDR) pathway.

[0276] The “efficiency” of non-homologous end joining (NHEJ) and/or homology directed repair (HDR) can be calculated by any convenient method. For example, in some cases, efficiency can be expressed in terms of percentage of successful HDR. For example, a surveyor nuclease assay can be used to generate cleavage products and the ratio of products to substrate can be used to calculate the percentage. For example, a surveyor nuclease enzyme can be used that directly cleaves DNA containing a newly integrated restriction sequence as the result of successful HDR. More cleaved substrate indicates a greater percent HDR (a greater efficiency of HDR). As an illustrative example, a fraction (percentage) of HDR can be calculated using the following equation [(cleavage products)/(substrate plus cleavage products)] (e.g., (b+c)/(a+b+c), where “a” is the band intensity of DNA substrate and “b” and “c” are the cleavage products).

[0277] In some cases, efficiency can be expressed in terms of percentage of successful NHEJ. For example, a T7 endonuclease I assay can be used to generate cleavage products and the ratio of products to substrate can be used to calculate the percentage NHEJ. T7 endonuclease I cleaves mismatched heteroduplex DNA which arises from hybridization of wild-type and mutant DNA strands (NHEJ generates small random insertions or deletions (indels) at the site of the original break). More cleavage indicates a greater percent NHEJ (a greater efficiency of NHEJ). As an illustrative example, a fraction (percentage) of NHEJ can be calculated using the following equation: (1−(1−(b+c)/(a+b+c))^{1/2})×100, where “a” is the band intensity of DNA substrate and “b” and “c” are the cleavage products (Ran et. al., Cell. 2013 Sep. 12; 154(6):1380-9; and Ran et al., Nat Protoc. 2013 November; 8(11): 2281-2308).

[0278] The NHEJ repair pathway is the most active repair mechanism, and it frequently causes small nucleotide insertions or deletions (indels) at the DSB site. The randomness of NHEJ-mediated DSB repair has important practical implications, because a population of cells expressing Cas9 and a gRNA or a guide polynucleotide can result in a diverse array of mutations. In most cases, NHEJ gives rise to small indels in the target DNA that result in amino acid deletions, insertions, or frameshift mutations leading to premature stop codons within the open reading frame (ORF) of the targeted gene. The ideal end result is a loss-of-function mutation within the targeted gene.

[0279] While NHEJ-mediated DSB repair often disrupts the open reading frame of the gene, homology directed repair (HDR) can be used to generate specific nucleotide changes ranging from a single nucleotide change to large insertions like the addition of a fluorophore or tag. In order to utilize HDR for gene editing, a DNA repair template containing the desired sequence can be delivered into the cell type of interest with the gRNA(s) and Cas9 or Cas9 nickase. The repair template can contain the desired edit as well as additional homologous sequence immediately upstream and downstream of the target (termed left & right homology arms). The length of each homology arm can be dependent on the size of the change being introduced, with larger insertions requiring longer homology arms. The repair template can be a single-stranded oligonucleotide, double-stranded oligonucleotide, or a double-stranded DNA plasmid. The efficiency of HDR is generally low (<10% of modified alleles) even in cells that express Cas9, gRNA and an exogenous repair template. The efficiency of HDR can be enhanced by synchronizing the cells, since HDR takes place during the S and G2 phases of the cell cycle. Chemically or genetically inhibiting genes involved in NHEJ can also increase HDR frequency.

[0280] In some embodiments, Cas9 is a modified Cas9. A given gRNA targeting sequence can have additional sites throughout the genome where partial homology exists. These sites are called off-targets and need to be considered when designing a gRNA. In addition to optimizing gRNA design, CRISPR specificity can also be increased through modifications to Cas9. Cas9 generates double-strand breaks (DSBs) through the combined activity of two nuclease domains, RuvC and HNH. Cas9 nickase, a D10A mutant of SpCas9, retains one nuclease domain and generates a DNA nick rather than a DSB. The nickase system can also be combined with HDR-mediated gene editing for specific gene edits.

[0281] In some cases, Cas9 is a variant Cas9 protein. A variant Cas9 polypeptide has an amino acid sequence that is different by one amino acid (e.g., has a deletion, insertion, substitution, fusion) when compared to the amino acid sequence of a wild type Cas9 protein. In some instances, the variant Cas9 polypeptide has an amino acid change (e.g., deletion, insertion, or substitution) that reduces the nuclease activity of the Cas9 polypeptide. For example, in some instances, the variant Cas9 polypeptide has less than 50%, less than 40%, less than 30%, less than 20%, less than 10%, less than 5%, or less than 1% of the nuclease activity of the corresponding wild-type Cas9 protein. In some cases, the variant Cas9 protein has no substantial nuclease activity. When a subject Cas9 protein is a variant Cas9 protein that has no substantial nuclease activity, it can be referred to as “dCas9.”

[0282] In some cases, a variant Cas9 protein has reduced nuclease activity. For example, a variant Cas9 protein exhibits less than about 20%, less than about 15%, less than about 10%, less than about 5%, less than about 1%, or less than about 0.1%, of the endonuclease activity of a wild-type Cas9 protein, e.g., a wild-type Cas9 protein.

[0283] In some cases, a variant Cas9 protein can cleave the complementary strand of a guide target sequence but has reduced ability to cleave the non-complementary strand of a double stranded guide target sequence. For example, the variant Cas9 protein can have a mutation (amino acid substitution) that reduces the function of the RuvC domain. As a non-limiting example, in some embodiments, a variant Cas9 protein has a D10A (aspartate to alanine at amino acid position 10) and can therefore cleave the complementary strand of a double stranded guide target sequence but has reduced ability to cleave the non-complementary strand of a double stranded guide target sequence (thus resulting in a single strand break (SSB) instead of a double strand break (DSB) when the variant Cas9 protein cleaves a double stranded target nucleic acid) (see, for example, Jinek et al., Science. 2012 Aug. 17; 337(6096):816-21).

[0284] In some cases, a variant Cas9 protein can cleave the non-complementary strand of a double stranded guide target sequence but has reduced ability to cleave the complementary strand of the guide target sequence. For example, the variant Cas9 protein can have a mutation (amino acid substitution) that reduces the function of the HNH domain (RuvC/HNH/RuvC domain motifs). As a non-limiting example, in some embodiments, the variant Cas9 protein has an H840A (histidine to alanine at amino acid position 840) mutation and can therefore cleave the non-complementary strand of the guide target sequence but has reduced ability to cleave the complementary strand of the guide target sequence (thus resulting in a SSB instead of a DSB when the variant Cas9 protein cleaves a double stranded guide target sequence). Such a Cas9 protein has a reduced ability to cleave a guide target sequence (e.g., a single stranded guide target sequence) but retains the ability to bind a guide target sequence (e.g., a single stranded guide target sequence).

[0285] In some cases, a variant Cas9 protein has a reduced ability to cleave both the complementary and the non-complementary strands of a double stranded target DNA. As a non-limiting example, in some cases, the variant Cas9 protein harbors both the D10A and the H840A mutations such that the polypeptide has a reduced ability to cleave both the complementary and the non-complementary strands of a double stranded target DNA. Such a Cas9 protein has a reduced ability to cleave a target DNA (e.g., a single stranded target DNA) but retains the ability to bind a target DNA (e.g., a single stranded target DNA).

[0286] As another non-limiting example, in some cases, the variant Cas9 protein harbors W476A and W1126A mutations such that the polypeptide has a reduced ability to cleave a target DNA. Such a Cas9 protein has a reduced ability to cleave a target DNA (e.g., a single stranded target DNA) but retains the ability to bind a target DNA (e.g., a single stranded target DNA).

[0287] As another non-limiting example, in some cases, the variant Cas9 protein harbors P475A, W476A, N477A, D1125A, W1126A, and D1127A mutations such that the polypeptide has a reduced ability to cleave a target DNA. Such a Cas9 protein has a reduced ability to cleave a target DNA (e.g., a single stranded target DNA) but retains the ability to bind a target DNA (e.g., a single stranded target DNA).

[0288] As another non-limiting example, in some cases, the variant Cas9 protein harbors H840A, W476A, and W1126A, mutations such that the polypeptide has a reduced ability to cleave a target DNA. Such a Cas9 protein has a reduced ability to cleave a target DNA (e.g., a single stranded target DNA) but retains the ability to bind a target DNA (e.g., a single stranded target DNA). As another non-limiting example, in some cases, the variant Cas9 protein harbors H840A, D10A, W476A, and W1126A, mutations such that the polypeptide has a reduced ability to cleave a target DNA. Such a Cas9 protein has a reduced ability to cleave a target DNA (e.g., a single stranded target DNA) but retains the ability to bind a target DNA (e.g., a single stranded target DNA). In some embodiments, the variant Cas9 has restored catalytic His residue at position 840 in the Cas9 HNH domain (A840H).

[0289] As another non-limiting example, in some cases, the variant Cas9 protein harbors, H840A, P475A, W476A, N477A, D1125A, W1126A, and D1127A mutations such that the polypeptide has a reduced ability to cleave a target DNA. Such a Cas9 protein has a reduced ability to cleave a target DNA (e.g., a single stranded target DNA) but retains the ability to bind a target DNA (e.g., a single stranded target DNA). As another non-limiting example, in some cases, the variant Cas9 protein harbors D10A, H840A, P475A, W476A, N477A, D1125A, W1126A, and D1127A mutations such that the polypeptide has a reduced ability to cleave a target DNA. Such a Cas9 protein has a reduced ability to cleave a target DNA (e.g., a single stranded target DNA) but retains the ability to bind a target DNA (e.g., a single stranded target DNA). In some cases, when a variant Cas9 protein harbors W476A and W1126A mutations or when the variant Cas9 protein harbors P475A, W476A, N477A, D1125A, W1126A, and D1127A mutations, the variant Cas9 protein does not bind efficiently to a PAM sequence. Thus, in some such cases, when such a variant Cas9 protein is used in a method of binding, the method does not require a PAM sequence. In other words, in some cases, when such a variant Cas9 protein is used in a method of binding, the method can include a guide RNA, but the method can be performed in the absence of a PAM sequence (and the specificity of binding is therefore provided by the targeting segment of the guide RNA). Other residues can be mutated to achieve the above effects (i.e., inactivate one or the other nuclease portions). As non-limiting examples, residues D10, G12, G17, E762, H840, N854, N863, H982, H983, A984, D986, and/or A987 can be altered (i.e., substituted). Also, mutations other than alanine substitutions are suitable.

[0290] In some embodiments, a variant Cas9 protein that has reduced catalytic activity (e.g., when a Cas9 protein has a D10, G12, G17, E762, H840, N854, N863, H982, H983, A984, D986, and/or a A987 mutation, e.g., D10A, G12A, G17A, E762A, H840A, N854A, N863A, H982A, H983A, A984A, and/or D986A), the variant Cas9 protein can still bind to target DNA in a site-specific manner (because it is still guided to a target DNA sequence by a guide RNA) as long as it retains the ability to interact with the guide RNA.

[0291] In some embodiments, the variant Cas protein can be spCas9, spCas9-VRQR, spCas9-VRER, xCas9 (sp), saCas9, saCas9-KKH, SpCas9-MQKFRAER, spCas9-MQKSER, spCas9-LRKIQK, or spCas9-LRVSQL.

[0292] In some embodiments, a modified SpCas9 including amino acid substitutions D1135M, S1136Q, G1218K, E1219F, A1322R, D1332A, R1335E, and T1337R (SpCas9-MQKFRAER) and having specificity for the altered PAM 5′-NGC-3′ is used.

[0293] Alternatives to S. pyogenes Cas9 can include RNA-guided endonucleases from the Cpf1 family that display cleavage activity in mammalian cells. CRISPR from Prevotella and Francisella 1 (CRISPR/Cpf1) is a DNA-editing technology analogous to the CRISPR/Cas9 system. Cpf1 is an RNA-guided endonuclease of a class II CRISPR/Cas system. This acquired immune mechanism is found in Prevotella and Francisella bacteria. Cpf1 genes are associated with the CRISPR locus, coding for an endonuclease that use a guide RNA to find and cleave viral DNA. Cpf1 is a smaller and simpler endonuclease than Cas9, overcoming some of the CRISPR/Cas9 system limitations. Unlike Cas9 nucleases, the result of Cpf1-mediated DNA cleavage is a double-strand break with a short 3′ overhang. Cpf1's staggered cleavage pattern can open up the possibility of directional gene transfer, analogous to traditional restriction enzyme cloning, which can increase the efficiency of gene editing. Like the Cas9 variants and orthologues described above, Cpf1 can also expand the number of sites that can be targeted by CRISPR to AT-rich regions or AT-rich genomes that lack the NGG PAM sites favored by SpCas9. The Cpf1 locus contains a mixed alpha/beta domain, a RuvC-I followed by a helical region, a RuvC-II and a zinc finger-like domain. The Cpf1 protein has a RuvC-like endonuclease domain that is similar to the RuvC domain of Cas9. Furthermore, Cpf1 does not have a HNH endonuclease domain, and the N-terminal of Cpf1 does not have the alpha-helical recognition lobe of Cas9. Cpf1 CRISPR-Cas domain architecture shows that Cpf1 is functionally unique, being classified as Class 2, type V CRISPR system. The Cpf1 loci encode Cas1, Cas2 and Cas4 proteins more similar to types I and III than from type II systems. Functional Cpf1 doesn't need the trans-activating CRISPR RNA (tracrRNA), therefore, only CRISPR (crRNA) is required. This benefits genome editing because Cpf1 is not only smaller than Cas9, but also it has a smaller sgRNA molecule (proximately half as many nucleotides as Cas9). The Cpf1-crRNA complex cleaves target DNA or RNA by identification of a protospacer adjacent motif 5′-YTN-3′ in contrast to the G-rich PAM targeted by Cas9. After identification of PAM, Cpf1 introduces a sticky-end-like DNA double-stranded break of 4 or 5 nucleotides overhang.

[0294] In some embodiments, the Cas9 is a Cas9 variant having specificity for an altered PAM sequence. In some embodiments, the Additional Cas9 variants and PAM sequences are described in Miller, S. M., et al. Continuous evolution of SpCas9 variants compatible with non-G PAMs, Nat. Biotechnol. (2020), the entirety of which is incorporated herein by reference. in some embodiments, a Cas9 variate have no specific PAM requirements. In some embodiments, a Cas9 variant, e.g. a SpCas9 variant has specificity for a NRNH PAM, wherein R is A or G and H is A, C, or T. In some embodiments, the SpCas9 variant has specificity for a PAM sequence AAA, TAA, CAA, GAA, TAT, GAT, or CAC. In some embodiments, the SpCas9 variant comprises an amino acid substitution at position 1114, 1134, 1135, 1137, 1139, 1151, 1180, 1188, 1211, 1218, 1219, 1221, 1249, 1256, 1264, 1290, 1318, 1317, 1320, 1321, 1323, 1332, 1333, 1335, 1337, or 1339 or a corresponding position thereof. In some embodiments, the SpCas9 variant comprises an amino acid substitution at position 1114, 1135, 1218, 1219, 1221, 1249, 1320, 1321, 1323, 1332, 1333, 1335, or 1337 or a corresponding position thereof. In some embodiments, the SpCas9 variant comprises an amino acid substitution at position 1114, 1134, 1135, 1137, 1139, 1151, 1180, 1188, 1211, 1219, 1221, 1256, 1264, 1290, 1318, 1317, 1320, 1323, 1333 or a corresponding position thereof. In some embodiments, the SpCas9 variant comprises an amino acid substitution at position 1114, 1131, 1135, 1150, 1156, 1180, 1191, 1218, 1219, 1221, 1227, 1249, 1253, 1286, 1293, 1320, 1321, 1332, 1335, 1339 or a corresponding position thereof. In some embodiments, the SpCas9 variant comprises an amino acid substitution at position 1114, 1127, 1135, 1180, 1207, 1219, 1234, 1286, 1301, 1332, 1335, 1337, 1338, 1349 or a corresponding position thereof. Exemplary amino acid substitutions and PAM specificity of SpCas9 variants are shown in Tables 1A-1D.

TABLE 1A

| | SpCas9 amino acid position | | | | | | | | | | | | |
|---|---|---|---|---|---|---|---|---|---|---|---|---|---|
| | 1114 | 1135 | 1218 | 1219 | 1221 | 1249 | 1320 | 1321 | 1323 | 1332 | 1333 | 1335 | 1337 |
| SpCas9 | R | D | G | E | Q | P | A | P | A | D | R | R | T |
| AAA | | N | | V | H | | | | | | G | | |
| AAA | | N | | V | H | | | | | | G | | |
| AAA | | | | V | | | | | | | G | | |
| TAA | G | N | | V | | | | | | | I | | |
| TAA | | N | | V | | | | | | | I | | A |
| TAA | G | N | | V | | | | | | | I | | A |
| CAA | | | | V | | | | | | | K | | |
| CAA | | N | | V | | | | | | | K | | |
| CAA | | N | | V | | | | | | | K | | |
| GAA | | | | V | H | | V | | | | K | | |
| GAA | | N | | V | | | V | | | | K | | |
| GAA | | | | V | H | | V | | | | K | | |
| TAT | | | S | V | H | S | | S | | | | L | |
| TAT | | | S | V | H | S | | S | | | | L | |
| TAT | | | S | V | H | S | | S | | | | L | |
| GAT | | | | V | | | | | | | I | | |
| GAT | | | | V | | | | | D | | | Q | |
| GAT | | | | V | | | | | D | | | Q | |
| CAC | | | | V | | | | | | N | | Q | N |
| CAC | | N | | V | | | | | | | | Q | N |
| CAC | | | | V | | | | | | N | | Q | N |

TABLE 1B

| | SpCas9 amino acid position | | | | | | | | | | | | | | | | | | |
|---|---|---|---|---|---|---|---|---|---|---|---|---|---|---|---|---|---|---|---|
| | 1114 | 1134 | 1135 | 1137 | 1139 | 1151 | 1180 | 1188 | 1211 | 1219 | 1221 | 1256 | 1264 | 1290 | 1318 | 1317 | 1320 | 1323 | 1333 |
| SpCas9 | R | F | D | P | V | K | D | K | K | E | Q | Q | H | V | L | N | A | A | R |
| GAA | | | | | | | | | | V | H | | | | | | V | | K |
| GAA | | | N | S | | | | | | V | | | | | | | V | D | K |
| GAA | | | N | | | | | | | V | H | | Y | | | | V | | K |
| CAA | | | N | | | | | | | V | H | | Y | | | | V | | K |
| CAA | G | | N | S | | | | | | V | H | | Y | | | | V | | K |
| CAA | | | N | | | | | R | | V | H | | | | | | V | | K |
| CAA | | | N | | | | G | | R | V | H | | Y | | | | V | | K |
| CAA | | | N | | | | | | | V | H | | Y | | | | V | | K |
| AAA | | | N | | | | G | | | V | H | R | Y | | | | V | D | K |
| CAA | G | | N | | | | G | | | V | H | | Y | | | | V | D | K |
| CAA | | L | N | | | | G | | | V | H | | Y | | | T | V | D | K |
| TAA | G | | N | | | | G | | | V | H | | Y | G | S | | V | D | K |
| TAA | G | | N | | | E | G | | | V | H | | Y | | S | | V | | K |
| TAA | G | | N | | | | G | | | V | H | | Y | | S | | V | D | K |
| TAA | G | | N | | | | G | | R | V | H | | | | | | V | | K |
| TAA | | | N | | | | G | | R | V | H | | Y | | | | V | | K |
| TAA | G | | N | | A | | G | | | V | H | | | | | | V | | K |
| TAA | G | | N | | | | | | | V | H | | | | | | V | | K |

TABLE 1C

| | | SpCas9 amino acid position | | | | | | | | | | | | | | | | | | |
|---|---|---|---|---|---|---|---|---|---|---|---|---|---|---|---|---|---|---|---|---|
| Sp- | 1114 | 1131 | 1135 | 1150 | 1156 | 1180 | 1191 | 1218 | 1219 | 1221 | 1227 | 1249 | 1253 | 1286 | 1293 | 1320 | 1321 | 1332 | 1335 | 1339 |
| Cas9 | R | Y | D | E | K | D | K | G | E | Q | A | P | E | N | A | A | P | D | R | T |
| SacB. | | | N | | | | N | | V | H | | | | | | V | S | | L | |
| TAT | | | | | | | | | | | | | | | | | | | | |
| SacB. | | | N | | | | | S | V | H | | S | | | | | S | G | L | |
| TAT | | | | | | | | | | | | | | | | | | | | |
| AAT | | | N | | | | | S | V | H | V | S | | K | T | | S | G | L | I |
| TAT | G | | N | | | G | | S | V | H | | S | K | | | | S | G | L | |
| TAT | G | | N | | | G | | S | V | H | | S | | | | | S | G | L | |
| TAT | G | C | N | | | G | | S | V | H | | S | | | | | S | G | L | |
| TAT | G | C | N | | | G | | S | V | H | | S | | | | | S | G | L | |
| TAT | G | C | N | | | G | | S | V | H | | S | | | | | S | G | L | |
| TAT | G | C | N | | E | G | | S | V | H | | S | | | | | S | G | L | |
| TAT | G | C | N | V | | G | | S | V | H | | S | | | | | S | G | L | |
| TAT | | C | N | | | G | | S | V | H | | S | | | | | S | G | L | |
| TAT | G | C | N | | | G | | S | V | H | | S | | | | | S | G | L | |

TABLE 1D

| | SpCas9 amino acid position | | | | | | | | | | | | | |
|---|---|---|---|---|---|---|---|---|---|---|---|---|---|---|
| | 1114 | 1127 | 1135 | 1180 | 1207 | 1219 | 1234 | 1286 | 1301 | 1332 | 1335 | 1337 | 1338 | 134 |
| SpCas9 | R | D | D | D | E | E | N | N | P | D | R | T | S | H |
| SacB. | | | N | | | V | | | | N | Q | N | | |
| CAC | | | | | | | | | | | | | | |
| AAC | G | | N | | | V | | | | N | Q | N | | |
| AAC | G | | N | | | V | | | | N | Q | N | | |
| TAC | G | | N | | | V | | | | N | Q | N | | |
| TAC | G | | N | | | V | | H | | N | Q | N | | |
| TAC | G | | N | | G | V | D | H | | N | Q | N | | |
| TAC | G | | N | | | V | | | | N | Q | N | | |
| TAC | G | G | N | E | | V | | H | | N | Q | N | | |
| TAC | G | | N | | | V | | H | | N | Q | N | | |
| TAC | G | | N | | | V | | | | N | Q | N | T | R |

[0295] In some embodiments, the Cas9 is a Neisseria meningitidis Cas9 (NmeCas9) or a variant thereof. In some embodiments, the NmeCas9 has specificity for a NNNNGAYW PAM, wherein Y is C or T and W is A or T. In some embodiments, the NmeCas9 has specificity for a NNNNGYTT PAM, wherein Y is C or T. In some embodiments, the NmeCas9 has specificity for a NNNNGTCT PAM. In some embodiments, the NmeCas9 is a Nme1 Cas9. In some embodiments, the NmeCas9 has specificity for a NNNNGATT PAM, a NNNNCCTA PAM, a NNNNCCTC PAM, a NNNNCCTT PAM, a NNNNCCTG PAM, a NNNNCCGT PAM, a NNNNCCGGPAM, a NNNNCCCA PAM, a NNNNCCCT PAM, a NNNNCCCC PAM, a NNNNCCAT PAM, a NNNNCCAG PAM, a NNNNCCAT PAM, or a NNNGATT PAM. In some embodiments, the Nme1Cas9 has specificity for a NNNNGATT PAM, a NNNNCCTA PAM, a NNNNCCTC PAM, a NNNNCCTT PAM, or a NNNNCCTG PAM. In some embodiments, the NmeCas9 has specificity for a CAA PAM, a CAAA PAM, or a CCA PAM. In some embodiments, the NmeCas9 is a Nme2 Cas9. In some embodiments, the NmeCas9 has specificity for a NNNNCC (N4CC) PAM, wherein N is any one of A, G, C, or T. in some embodiments, the NmeCas9 has specificity for a NNNNCCGT PAM, a NNNNCCGGPAM, a NNNNCCCA PAM, a NNNNCCCT PAM, a NNNNCCCC PAM, a NNNNCCAT PAM, a NNNNCCAG PAM, a NNNNCCAT PAM, or a NNNGATT PAM. In some embodiments, the NmeCas9 is a Nme3Cas9. In some embodiments, the NmeCas9 has specificity for a NNNNCAAA PAM, a NNNNCC PAM, or a NNNNCNNN PAM. Additional NmeCas9 features and PAM sequences as described in Edraki et al. Mol. Cell. (2019) 73(4): 714-726 is incorporated herein by reference in its entirety. An exemplary amino acid sequence of a Nme1Cas9 is provided below:

type II CRISPR RNA-guided endonuclease Cas9
[Neisseria meningitidis] WP_002235162.1

| | |
|---|---|
| 1 | maafkpnpin yilgldigia svgwamveid edenpiclid |
| | lgvrvferae vpktgdslam |
| 61 | arrlarsvrr ltrrrahrll rarrllkreg vlqaadfden |
| | glikslpntp wqlraaaldr |
| 121 | kltplewsav llhlikhrgy lsqrkneget adkelgallk |
| | gvadnahalq tgdfrtpael |
| 181 | alnkfekesg hirnqrgdys htfsrkdlqa elillfekqk |
| | efgnphvsgg ikegietllm |
| 241 | tqrpalsgda vqkmlghctf epaepkaakn tytaerfiwl |
| | tklnnlrile qgserpltdt |
| 301 | eratlmdepy rkskltyaqa rkllgledta ffkglrygkd |
| | naeastlmem kayhaisral |
| 361 | ekeglkdkks plnlspelqd eigtafslfk tdeditgrlk |
| | driqpeilea llkhisfdkf |
| 421 | vqislkalrr ivplmeqgkr ydeacaeiyg dhygkkntee |
| | kiylppipad eirnpvvlra |
| 481 | lsqarkving vvrrygspar ihietarevg ksfkdrkeie |
| | krqeenrkdr ekaaakfrey |
| 541 | fpnfvgepks kdilklrlye qqhgkclysg keinlgrlne |
| | kgyveidhal pfsrtwddsf |
| 601 | nnkvlvlgse nqnkgnqtpy eyfngkdnsr ewqefkarve |
| | tsrfprskkq rillqkfded |
| 661 | gfkernlndt ryvnrflcqf vadrmrltgk gkkrvfasng |
| | qitnllrgfw glrkvraend |
| 721 | rhhaldavvv acstvamqqk itrfvrykem nafdgktidk |
| | etgevlhqkt hfpqpweffa |
| 781 | qevmirvfgk pdgkpefeea dtpeklrtll aeklssrpea |
| | vheyvtplfv srapnrkmsg |
| 841 | qghmetvksa krldegvsvl rvpltqlklk dlekmvnrer |
| | epklyealka rleahkddpa |
| 901 | kafaepfyky dkagnrtqqv kavrveqvqk tgvwvrnhng |
| | iadnatmvrv dvfekgdkyy |
| 961 | lvpiyswqva kgilpdravv qgkdeedwql iddsfnfkfs |
| | lhpndlvevi tkkarmfgyf |
| 1021 | aschrgtgni nirihdldhk igkngilegi gvktalsfqk |
| | yqidelgkei rpcrlkkrpp |
| 1081 | vr |

[0296] An exemplary amino acid sequence of a Nme2Cas9 is provided below:

type II CRISPR RNA-guided endonuclease Cas9
[Neisseria meningitidis] WP_002230835.1

| | |
|---|---|
| 1 | maafkpnpin yilgldigia svgwamveid eeenpirlid |
| | lgvrvferae vpktgdslam |
| 61 | arrlarsvrr ltrrrahrll rarrllkreg vlqaadfden |
| | glikslpntp wqlraaaldr |
| 121 | kltplewsav llhlikhrgy lsqrkneget adkelgallk |
| | gvannahalq tgdfrtpael |
| 181 | alnkfekesg hirnqrgdys htfsrkdlqa elillfekqk |
| | efgnphvsgg lkegietllm |
| 241 | tqrpalsgda vqkmlghctf epaepkaakn tytaerfiwl |
| | tklnnlrile qgserpltdt |
| 301 | eratlmdepy rkskltyaqa rkllgledta ffkglrygkd |
| | naeastlmem kayhaisral |
| 361 | ekeglkdkks plnlsselqd eigtafslfk tdeditgrlk |
| | drvqpeilea llkhisfdkf |
| 421 | vqislkalrr ivplmeqgkr ydeacaeiyg dhygkkntee |
| | kiylppipad eirnpvvlra |
| 481 | lsqarkving vvrrygspar ihietarevg ksfkdrkeie |
| | krqeenrkdr ekaaakfrey |
| 541 | fpnfvgepks kdilklrlye qqhgkclysg keinlvrlne |
| | kgyveidhal pfsrtwddsf |
| 601 | nnkvlvlgse nqnkgnqtpy eyfngkdnsr ewqefkarve |
| | tsrfprskkq rillqkfded |
| 661 | gfkecnlndt ryvnrflcqf vadhilltgk gkrrvfasng |
| | qitnllrgfw glrkvraend |
| 721 | rhhaldavvv acstvamqqk itrfvrykem nafdgktidk |
| | etgkvlhqkt hfpqpweffa |
| 781 | qevmirvfgk pdgkpefeea dtpeklrtll aeklssrpea |
| | vheyvtplfv srapnrkmsg |
| 841 | ahkdtlrsak rfvkhnekis vkrvwlteik ladlenmvny |
| | kngreielye alkarleayg |
| 901 | gnakqafdpk dnpfykkggq lvkavrvekt qesgvllnkk |
| | naytiadngd mvrvdvfckv |
| 961 | dkkgknqyfi vpiyawqvae nilpdidckg yriddsytfc |
| | fslhkydlia fqkdekskve |
| 1021 | fayyincdss ngrfylawhd kgskeqqfri stqnlvliqk |
| | yqvnelgkei rpcrlkkrpp |
| 1081 | vr |

### Cas12 Domains of Nucleobase Editors

[0297] Typically, microbial CRISPR-Cas systems are divided into Class 1 and Class 2 systems. Class 1 systems have multisubunit effector complexes, while Class 2 systems have a single protein effector. For example, Cas9 and Cpf1 are Class 2 effectors, albeit different types (Type II and Type V, respectively). In addition to Cpf1, Class 2, Type V CRISPR-Cas systems also comprise Cas12a/Cpf1, Cas12b/C2c1, Cas12c/C2c3, Cas12d/CasY, Cas12e/CasX, Cas12g, Cas12h, Cas12i and Cas12j/CasΦ. See, e.g., Shmakov et al., “Discovery and Functional Characterization of Diverse Class 2 CRISPR Cas Systems,” Mol. Cell, 2015 Nov. 5; 60(3): 385-397; Makarova et al., “Classification and Nomenclature of CRISPR-Cas Systems: Where from Here?” CRISPR Journal, 2018, 1(5): 325-336; and Yan et al., “Functionally Diverse Type V CRISPR-Cas Systems,” Science, 2019 Jan. 4; 363: 88-91; the entire contents of each is hereby incorporated by reference. Type V Cas proteins contain a RuvC (or RuvC-like) endonuclease domain. While production of mature CRISPR RNA (crRNA) is generally tracrRNA-independent, Cas12b/C2c1, for example, requires tracrRNA for production of crRNA. Cas12b/C2c1 depends on both crRNA and tracrRNA for DNA cleavage.

[0298] Nucleic acid programmable DNA binding proteins contemplated in the present invention include Cas proteins that are classified as Class 2, Type V (Cas12 proteins). Non-limiting examples of Cas Class 2, Type V proteins include Cas12a/Cpf1, Cas12b/C2c1, Cas12c/C2c3, Cas12d/CasY, Cas12e/CasX, Cas12g, Cas12h, Cas12i, and Cas12j/CasΦ homologues thereof, or modified versions thereof. As used herein, a Cas12 protein can also be referred to as a Cas12 nuclease, a Cas12 domain, or a Cas12 protein domain. In some embodiments, the Cas12 proteins of the present invention comprise an amino acid sequence interrupted by an internally fused protein domain such as a deaminase domain.

[0299] In some embodiments, the Cas12 domain is a nuclease inactive Cas12 domain or a Cas12 nickase. In some embodiments, the Cas12 domain is a nuclease active domain. For example, the Cas12 domain may be a Cas12 domain that nicks one strand of a duplexed nucleic acid (e.g., duplexed DNA molecule). In some embodiments, the Cas12 domain comprises any one of the amino acid sequences as set forth herein. In some embodiments the Cas12 domain comprises an amino acid sequence that is at least 60%, at least 65%, at least 70%, at least 75%, at least 80%, at least 85%, at least 90%, at least 95%, at least 96%, at least 97%, at least 98%, at least 99%, or at least 99.5% identical to any one of the amino acid sequences set forth herein. In some embodiments, the Cas12 domain comprises an amino acid sequence that has 1, 2, 3, 4, 5, 6, 7, 8, 9, 10, 11, 12, 13, 14, 15, 16, 17, 18, 19, 20, 21, 22, 23, 24, 25, 26, 27, 28, 29, 30, 31, 32, 33, 34, 35, 36, 37, 38, 39, 40, 41, 42, 43, 44, 45, 46, 47, 48, 49, 50 or more mutations compared to any one of the amino acid sequences set forth herein. In some embodiments, the Cas12 domain comprises an amino acid sequence that has at least 10, at least 15, at least 20, at least 30, at least 40, at least 50, at least 60, at least 70, at least 80, at least 90, at least 100, at least 150, at least 200, at least 250, at least 300, at least 350, at least 400, at least 500, at least 600, at least 700, at least 800, at least 900, at least 1000, at least 1100, or at least 1200 identical contiguous amino acid residues as compared to any one of the amino acid sequences set forth herein.

[0300] In some embodiments, proteins comprising fragments of Cas12 are provided. For example, in some embodiments, a protein comprises one of two Cas12 domains: (1) the gRNA binding domain of Cas12; or (2) the DNA cleavage domain of Cas12. In some embodiments, proteins comprising Cas12 or fragments thereof are referred to as “Cas12 variants.” A Cas12 variant shares homology to Cas12, or a fragment thereof. For example, a Cas12 variant is at least about 70% identical, at least about 80% identical, at least about 90% identical, at least about 95% identical, at least about 96% identical, at least about 97% identical, at least about 98% identical, at least about 99% identical, at least about 99.5% identical, or at least about 99.9% identical to wild type Cas12. In some embodiments, the Cas12 variant may have 1, 2, 3, 4, 5, 6, 7, 8, 9, 10, 11, 12, 13, 14, 15, 16, 17, 18, 19, 20, 21, 22, 23, 24, 25, 26, 27, 28, 29, 30, 31, 32, 33, 34, 35, 36, 37, 38, 39, 40, 41, 42, 43, 44, 45, 46, 47, 48, 49, 50 or more amino acid changes compared to wild type Cas12. In some embodiments, the Cas12 variant comprises a fragment of Cas12 (e.g., a gRNA binding domain or a DNA cleavage domain), such that the fragment is at least about 70% identical, at least about 80% identical, at least about 90% identical, at least about 95% identical, at least about 96% identical, at least about 97% identical, at least about 98% identical, at least about 99% identical, at least about 99.5% identical, or at least about 99.9% identical to the corresponding fragment of wild type Cas12. In some embodiments, the fragment is at least 30%, at least 35%, at least 40%, at least 45%, at least 50%, at least 55%, at least 60%, at least 65%, at least 70%, at least 75%, at least 80%, at least 85%, at least 90%, at least 95% identical, at least 96%, at least 97%, at least 98%, at least 99%, or at least 99.5% of the amino acid length of a corresponding wild type Cas12. In some embodiments, the fragment is at least 100 amino acids in length. In some embodiments, the fragment is at least 100, 150, 200, 250, 300, 350, 400, 450, 500, 550, 600, 650, 700, 750, 800, 850, 900, 950, 1000, 1050, 1100, 1150, 1200, 1250, or at least 1300 amino acids in length.

[0301] In some embodiments, Cas12 corresponds to, or comprises in part or in whole, a Cas12 amino acid sequence having one or more mutations that alter the Cas12 nuclease activity. Such mutations, by way of example, include amino acid substitutions within the RuvC nuclease domain of Cas12. In some embodiments, variants or homologues of Cas12 are provided which are at least about 70% identical, at least about 80% identical, at least about 90% identical, at least about 95% identical, at least about 98% identical, at least about 99% identical, at least about 99.5% identical, or at least about 99.9% identical to a wild type Cas12. In some embodiments, variants of Cas12 are provided having amino acid sequences which are shorter, or longer, by about 5 amino acids, by about 10 amino acids, by about 15 amino acids, by about 20 amino acids, by about 25 amino acids, by about 30 amino acids, by about 40 amino acids, by about 50 amino acids, by about 75 amino acids, by about 100 amino acids or more.

[0302] In some embodiments, Cas12 fusion proteins as provided herein comprise the full-length amino acid sequence of a Cas12 protein, e.g., one of the Cas12 sequences provided herein. In other embodiments, however, fusion proteins as provided herein do not comprise a full-length Cas12 sequence, but only one or more fragments thereof. Exemplary amino acid sequences of suitable Cas12 domains are provided herein, and additional suitable sequences of Cas12 domains and fragments will be apparent to those of skill in the art.

[0303] Generally, the class 2, Type V Cas proteins have a single functional RuvC endonuclease domain (See, e.g., Chen et al., “CRISPR-Cas12a target binding unleashes indiscriminate single-stranded DNase activity,” Science 360:436-439 (2018)). In some cases, the Cas12 protein is a variant Cas12b protein. (See Strecker et al., Nature Communications, 2019, 10(1): Art. No.: 212). In one embodiment, a variant Cas12 polypeptide has an amino acid sequence that is different by 1, 2, 3, 4, 5 or more amino acids (e.g., has a deletion, insertion, substitution, fusion) when compared to the amino acid sequence of a wild type Cas12 protein. In some instances, the variant Cas12 polypeptide has an amino acid change (e.g., deletion, insertion, or substitution) that reduces the activity of the Cas12 polypeptide. For example, in some instances, the variant Cas12 is a Cas12b polypeptide that has less than 50%, less than 40%, less than 30%, less than 20%, less than 10%, less than 5%, or less than 1% of the nickase activity of the corresponding wild-type Cas12b protein. In some cases, the variant Cas12b protein has no substantial nickase activity.

[0304] In some cases, a variant Cas12b protein has reduced nickase activity. For example, a variant Cas12b protein exhibits less than about 20%, less than about 15%, less than about 10%, less than about 5%, less than about 1%, or less than about 0.1%, of the nickase activity of a wild-type Cas12b protein.

[0305] In some embodiments, the Cas12 protein includes RNA-guided endonucleases from the Cas12a/Cpf1 family that displays activity in mammalian cells. CRISPR from Prevotella and Francisella 1 (CRISPR/Cpf1) is a DNA editing technology analogous to the CRISPR/Cas9 system. Cpf1 is an RNA-guided endonuclease of a class II CRISPR/Cas system. This acquired immune mechanism is found in Prevotella and Francisella bacteria. Cpf1 genes are associated with the CRISPR locus, coding for an endonuclease that use a guide RNA to find and cleave viral DNA. Cpf1 is a smaller and simpler endonuclease than Cas9, overcoming some of the CRISPR/Cas9 system limitations. Unlike Cas9 nucleases, the result of Cpf1-mediated DNA cleavage is a double-strand break with a short 3′ overhang. Cpf1's staggered cleavage pattern can open up the possibility of directional gene transfer, analogous to traditional restriction enzyme cloning, which can increase the efficiency of gene editing. Like the Cas9 variants and orthologues described above, Cpf1 can also expand the number of sites that can be targeted by CRISPR to AT-rich regions or AT-rich genomes that lack the NGG PAM sites favored by SpCas9. The Cpf1 locus contains a mixed alpha/beta domain, a RuvC-I followed by a helical region, a RuvC-II and a zinc finger-like domain. The Cpf1 protein has a RuvC-like endonuclease domain that is similar to the RuvC domain of Cas9. Furthermore, Cpf1, unlike Cas9, does not have a HNH endonuclease domain, and the N-terminal of Cpf1 does not have the alpha-helical recognition lobe of Cas9. Cpf1 CRISPR-Cas domain architecture shows that Cpf1 is functionally unique, being classified as Class 2, type V CRISPR system. The Cpf1 loci encode Cas1, Cas2, and Cas4 proteins are more similar to types I and III than type II systems. Functional Cpf1 does not require the trans-activating CRISPR RNA (tracrRNA), therefore, only CRISPR (crRNA) is required. This benefits genome editing because Cpf1 is not only smaller than Cas9, but also it has a smaller sgRNA molecule (approximately half as many nucleotides as Cas9). The Cpf1-crRNA complex cleaves target DNA or RNA by identification of a protospacer adjacent motif 5′-YTN-3′ or 5′-TTTN-3′ in contrast to the G-rich PAM targeted by Cas9. After identification of PAM, Cpf1 introduces a sticky-end-like DNA double-stranded break having an overhang of 4 or 5 nucleotides.

[0306] In some aspects of the present invention, a vector encodes a CRISPR enzyme that is mutated to with respect to a corresponding wild-type enzyme such that the mutated CRISPR enzyme lacks the ability to cleave one or both strands of a target polynucleotide containing a target sequence can be used. Cas12 can refer to a polypeptide with at least or at least about 50%, 60%, 70%, 80%, 90%, 91%, 92%, 93%, 94%, 95%, 96%, 97%, 98%, 99%, or 100% sequence identity and/or sequence homology to a wild type exemplary Cas12 polypeptide (e.g., Cas12 from Bacillus hisashii). Cas12 can refer to a polypeptide with at most or at most about 50%, 60%, 70%, 80%, 90%, 91%, 92%, 93%, 94%, 95%, 96%, 97%, 98%, 99%, or 100% sequence identity and/or sequence homology to a wild type exemplary Cas12 polypeptide (e.g., from Bacillus hisashii (BhCas12b), Bacillus sp. V3-13 (BvCas12b), and Alicyclobacillus acidiphilus (AaCas12b)). Cas12 can refer to the wild type or a modified form of the Cas12 protein that can comprise an amino acid change such as a deletion, insertion, substitution, variant, mutation, fusion, chimera, or any combination thereof.

[0307] In some embodiments, BhCas12b guide polynucleotide has the following sequence: BhCas12b sgRNA scaffold (underlined)+20nt to 23nt guide sequence (denoted by Nₙ)

5′GUUCUGTCUUUUGGUCAGGACAACCGUCUAGCUAUAAGUGCUGCAGGG
UGUGAGAAACUCCUAUUGCUGGACGAUGUCUCUUACGAGGCAUUAGCACN
NNNNNNNNNNNNNNNNNNN-3′

[0308] In some embodiments, BvCas12b and AaCas12b guide polynucleotides have the following sequences:

BvCas12b sgRNA scaffold (underlined)+20nt to 23nt guide sequence (denoted by Nₙ)

5′GACCUAUAGGGUCAAUGAAUCUGUGCGUGUGCCAUAAGUA
AUUAAAAAUUACCCACCACAGGAGCACCUGAAAACAGGUGCU
UGGCACNNNNNNNNNNNNNNNNNNNN-3′

AaCas12b sgRNA scaffold (underlined)+20nt to 23nt guide sequence (denoted by Nₙ)

5′GUCUAAAGGACAGAAUUUUUCAACGGGUGUGCCAAUGGCC
ACUUUCCAGGUGGCAAAGCCCGUUGAACUUCUCAAAAAGAAC
GAUCUGAGAAGUGGCACNNNNNNNNNNNNNNNNNNNN-3'

### Nucleic Acid Programmable DNA Binding Proteins

[0309] Some aspects of the disclosure provide fusion proteins comprising domains that act as nucleic acid programmable DNA binding proteins, which may be used to guide a protein, such as a base editor, to a specific nucleic acid (e.g., DNA or RNA) sequence. In particular embodiments, a fusion protein comprises a nucleic acid programmable DNA binding protein domain and a deaminase domain. Non-limiting examples of nucleic acid programmable DNA binding proteins include, Cas9 (e.g., dCas9 and nCas9), Cas12a/Cpf1, Cas12b/C2c1, Cas12c/C2c3, Cas12d/CasY, Cas12e/CasX, Cas12g, Cas12h, Cas12i and Cas12j/CasΦ. Non-limiting examples of Cas enzymes include Cas1, Cas1B, Cas2, Cas3, Cas4, Cas5, Cas5d, Cas5t, Cas5h, Cas5a, Cas6, Cas7, Cas8, Cas8a, Cas8b, Cas8c, Cas9 (also known as Csn1 or Csx12), Cas10, Cas10d, Cas12a/Cpf1, Cas12b/C2c1, Cas12c/C2c3, Cas12d/CasY, Cas12e/CasX, Cas12g, Cas12h, Cas12i, Cas12j/CasΦ, Csy1, Csy2, Csy3, Csy4, Cse1, Cse2, Cse3, Cse4, Cse5e, Csc1, Csc2, Csa5, Csn1, Csn2, Csm1, Csm2, Csm3, Csm4, Csm5, Csm6, Cmr1, Cmr3, Cmr4, Cmr5, Cmr6, Csb1, Csb2, Csb3, Csx17, Csx14, Csx10, Csx16, CsaX, Csx3, Csx1, Csx1S, Csx11, Csf1, Csf2, CsO, Csf4, Csd1, Csd2, Cst1, Cst2, Csh1, Csh2, Csa1, Csa2, Csa3, Csa4, Csa5, Type II Cas effector proteins, Type V Cas effector proteins, Type VI Cas effector proteins, CARF, DinG, homologues thereof, or modified or engineered versions thereof. Other nucleic acid programmable DNA binding proteins are also within the scope of this disclosure, although they may not be specifically listed in this disclosure. See, e.g., Makarova et al. “Classification and Nomenclature of CRISPR-Cas Systems: Where from Here?” CRISPR J. 2018 October; 1:325-336. doi: 10.1089/crispr.2018.0033; Yan et al., “Functionally diverse type V CRISPR-Cas systems” Science. 2019 Jan. 4; 363(6422):88-91. doi: 10.1126/science.aav7271, the entire contents of each are hereby incorporated by reference.

[0310] One example of a nucleic acid programmable DNA-binding protein that has different PAM specificity than Cas9 is Clustered Regularly Interspaced Short Palindromic Repeats from Prevotella and Francisella 1 (Cpf1). Similar to Cas9, Cpf1 is also a class 2 CRISPR effector. It has been shown that Cpf1 mediates robust DNA interference with features distinct from Cas9. Cpf1 is a single RNA-guided endonuclease lacking tracrRNA, and it utilizes a T-rich protospacer-adjacent motif (TTN, TTTN, or YTN). Moreover, Cpf1 cleaves DNA via a staggered DNA double-stranded break. Out of 16 Cpf1-family proteins, two enzymes from Acidaminococcus and Lachnospiraceae are shown to have efficient genome-editing activity in human cells. Cpf1 proteins are known in the art and have been described previously, for example Yamano et al., “Crystal structure of Cpf1 in complex with guide RNA and target DNA.” Cell (165) 2016, p. 949-962; the entire contents of which is hereby incorporated by reference.

[0311] Useful in the present compositions and methods are nuclease-inactive Cpf1 (dCpf1) variants that may be used as a guide nucleotide sequence-programmable DNA-binding protein domain. The Cpf1 protein has a RuvC-like endonuclease domain that is similar to the RuvC domain of Cas9 but does not have a HNH endonuclease domain, and the N-terminal of Cpf1 does not have the alfa-helical recognition lobe of Cas9. It was shown in Zetsche et al., Cell, 163, 759-771, 2015 (which is incorporated herein by reference) that, the RuvC-like domain of Cpf1 is responsible for cleaving both DNA strands and inactivation of the RuvC-like domain inactivates Cpf1 nuclease activity. For example, mutations corresponding to D917A, E1006A, or D1255A in Francisella novicida Cpf1 inactivate Cpf1 nuclease activity. In some embodiments, the dCpf1 of the present disclosure comprises mutations corresponding to D917A, E1006A, D1255A, D917A/E1006A, D917A/D1255A, E1006A/D1255A, or D917A/E1006A/D1255A. It is to be understood that any mutations, e.g., substitution mutations, deletions, or insertions that inactivate the RuvC domain of Cpf1, may be used in accordance with the present disclosure.

[0312] In some embodiments, the nucleic acid programmable DNA binding protein (napDNAbp) of any of the fusion proteins provided herein may be a Cpf1 protein. In some embodiments, the Cpf1 protein is a Cpf1 nickase (nCpf1). In some embodiments, the Cpf1 protein is a nuclease inactive Cpf1 (dCpf1). In some embodiments, the Cpf1, the nCpf1, or the dCpf1 comprises an amino acid sequence that is at least 85%, at least 90%, at least 91%, at least 92%, at least 93%, at least 94%, at least 95%, at least 96%, at least 97%, at least 98%, at least 99%, or at least 99.5% identical to a Cpf1 sequence disclosed herein. In some embodiments, the dCpf1 comprises an amino acid sequence that is at least 85%, at least 90%, at least 91%, at least 92%, at least 93%, at least 94%, at least 95%, at least 96%, at least 97%, at least 98%, at least 99%, or at ease 99.5% identical to a Cpf1 sequence disclosed herein, and comprises mutations corresponding to D917A, E1006A, D1255A, D917A/E1006A, D917A/D1255A, E1006A/D1255A, or D917A/E1006A/D1255A. It should be appreciated that Cpf1 from other bacterial species may also be used in accordance with the present disclosure.

Wild-type Francisella novicida Cpf1 (D917, E1006, and D1255 are bolded and underlined)

MSIYQEFVNKYSLSKTLRFELIPQGKTLENIKARG
LILDDEKRAKDYKKAKQIIDKYHQEFIEEILSSVC
ISEDLLQNYSDVYFKLKKSDDDNLQKDFKSAKDTI
KKQISEYIKDSEKFKNLFNQNLIDAKKGQESDLIL
WLKQSKDNGIELFKANSDITDIDEALEIIKSFKGW
TTYFKGFHENRKNVYSSNDIPTSIIYRIVDDNLPK
FLENKAKYESLKDKAPEAINYEQIKKDLAEELTFD
IDYKTSEVNQRVFSLDEVFEIANFNNYLNQSGITK
FNTIIGGKFVNGENTKRKGINEYINLYSQQINDKT
LKKYKMSVLFKQILSDTESKSFVIDKLEDDSDVVT
TMQSFYEQIAAFKTVEEKSIKETLSLLFDDLKAQK
LDLSKIYFKNDKSLTDLSQQVFDDYSVIGTAVLEY
ITQQIAPKNLDNPSKKEQELIAKKTEKAKYLSLET
IKLALEEFNKHRDIDKQCRFEEILANFAAIPMIFD
EIAQNKDNLAQISIKYQNQGKKDLLQASAEDDVKA
IKDLLDQTNNLLHKLKIFHISQSEDKANILDKDEH
FYLVFEECYFELANIVPLYNKIRNYITQKPYSDEK
FKLNFENSTLANGWDKNKEPDNTAILFIKDDKYYL
GVMNKKNNKIFDDKAIKENKGEGYKKIVYKLLPGA
NKMLPKVFFSAKSIKFYNPSEDILRIRNHSTHTKN
GSPQKGYEKFEFNIEDCRKFIDFYKQSISKHPEWK
DFGFRFSDTQRYNSIDEFYREVENQGYKLTFENIS
ESYIDSVVNQGKLYLFQIYNKDFSAYSKGRPNLHT
LYWKALFDERNLQDVVYKLNGEAELFYRKQSIPKK
ITHPAKEAIANKNKDNPKKESVFEYDLIKDKRFTE
DKFFFHCPITINFKSSGANKFNDEINLLLKEKAND
VHILSIDRGERHLAYYTLVDGKGNIIKQDTFNIIG
NDRMKTNYHDKLAAIEKDRDSARKDWKKINNIKEM
KEGYLSQVVHEIAKLVIEYNAIVVFEDLNFGFKRG
RFKVEKQVYQKLEKMLIEKLNYLVFKDNEFDKTGG
VLRAYQLTAPFETFKKMGKQTGIIYYVPAGFTSKI
CPVTGFVNQLYPKYESVSKSQEFFSKFDKICYNLD
KGYFEFSFDYKNFGDKAAKGKWTIASFGSRLINFR
NSDKNHNWDTREVYPTKELEKLLKDYSIEYGHGEC
IKAAICGESDKKFFAKLTSVLNTILQMRNSKTGTE
LDYLISPVADVNGNFFDSRQAPKNMPQDADANGAY
HIGLKGLMLLGRIKNNQEGKKLNLVIKNEEYFEFV
QNRNN

Francisella novicida Cpf1 D917A (A917, E1006, and D1255 are bolded and underlined)

MSIYQEFVNKYSLSKTLRFELIPQGKTLENIKARG
LILDDEKRAKDYKKAKQIIDKYHQEFIEEILSSVC
ISEDLLQNYSDVYFKLKKSDDDNLQKDFKSAKDTI
KKQISEYIKDSEKFKNLFNQNLIDAKKGQESDLIL
WLKQSKDNGIELFKANSDITDIDEALEIIKSFKGW
TTYFKGFHENRKNVYSSNDIPTSIIYRIVDDNLPK
FLENKAKYESLKDKAPEAINYEQIKKDLAEELTFD
IDYKTSEVNQRVFSLDEVFEIANFNNYLNQSGITK
FNTIIGGKFVNGENTKRKGINEYINLYSQQINDKT
LKKYKMSVLFKQILSDTESKSFVIDKLEDDSDVVT
TMQSFYEQIAAFKTVEEKSIKETLSLLFDDLKAQK
LDLSKIYFKNDKSLTDLSQQVFDDYSVIGTAVLEY
ITQQIAPKNLDNPSKKEQELIAKKTEKAKYLSLET
IKLALEEFNKHRDIDKQCRFEEILANFAAIPMIFD
EIAQNKDNLAQISIKYQNQGKKDLLQASAEDDVKA
IKDLLDQTNNLLHKLKIFHISQSEDKANILDKDEH
FYLVFEECYFELANIVPLYNKIRNYITQKPYSDEK
FKLNFENSTLANGWDKNKEPDNTAILFIKDDKYYL
GVMNKKNNKIFDDKAIKENKGEGYKKIVYKLLPGA
NKMLPKVFFSAKSIKFYNPSEDILRIRNHSTHTKN
GSPQKGYEKFEFNIEDCRKFIDFYKQSISKHPEWK
DFGFRFSDTQRYNSIDEFYREVENQGYKLTFENIS
ESYIDSVVNQGKLYLFQIYNKDFSAYSKGRPNLHT
LYWKALFDERNLQDVVYKLNGEAELFYRKQSIPKK
ITHPAKEAIANKNKDNPKKESVFEYDLIKDKRFTE
DKFFFHCPITINFKSSGANKFNDEINLLLKEKAND
VHILSIARGERHLAYYTLVDGKGNIIKQDTFNIIG
NDRMKTNYHDKLAAIEKDRDSARKDWKKINNIKEM
KEGYLSQVVHEIAKLVIEYNAIVVFEDLNFGFKRG
RFKVEKQVYQKLEKMLIEKLNYLVFKDNEFDKTGG
VLRAYQLTAPFETFKKMGKQTGIIYYVPAGFTSKI
CPVTGFVNQLYPKYESVSKSQEFFSKFDKICYNLD
KGYFEFSFDYKNFGDKAAKGKWTIASFGSRLINFR
NSDKNHNWDTREVYPTKELEKLLKDYSIEYGHGEC
IKAAICGESDKKFFAKLTSVLNTILQMRNSKTGTE
LDYLISPVADVNGNFFDSRQAPKNMPQDADANGAY
HIGLKGLMLLGRIKNNQEGKKLNLVIKNEEYFEFVQ
NRNN

Francisella novicida Cpf1 E1006A (D917, A1006, and D1255 are bolded and underlined)

MSIYQEEVNKYSLSKTLRFELIPQGKTLENIKARG
LILDDEKRAKDYKKAKQIIDKYHQEFIEEILSSVC
ISEDLLQNYSDVYFKLKKSDDDNLQKDFKSAKDTI
KKQISEYIKDSEKFKNLFNQNLIDAKKGQESDLIL
WLKQSKDNGIELFKANSDITDIDEALEIIKSFKGW
TTYFKGFHENRKNVYSSNDIPTSIIYRIVDDNLPK
FLENKAKYESLKDKAPEAINYEQIKKDLAEELTFD
IDYKTSEVNQRVFSLDEVFEIANFNNYLNQSGITK
FNTIIGGKFVNGENTKRKGINEYINLYSQQINDKT
LKKYKMSVLFKQILSDTESKSFVIDKLEDDSDVVT
TMQSFYEQIAAFKTVEEKSIKETLSLLFDDLKAQK
LDLSKIYFKNDKSLTDLSQQVFDDYSVIGTAVLEY
ITQQIAPKNLDNPSKKEQELIAKKTEKAKYLSLET
IKLALEEFNKHRDIDKQCRFEEILANFAAIPMIFD
EIAQNKDNLAQISIKYQNQGKKDLLQASAEDDVKA
IKDLLDQTNNLLHKLKIFHISQSEDKANILDKDEH
FYLVFEECYFELANIVPLYNKIRNYITQKPYSDEK
FKLNFENSTLANGWDKNKEPDNTAILFIKDDKYYL
GVMNKKNNKIFDDKAIKENKGEGYKKIVYKLLPGA
NKMLPKVFFSAKSIKFYNPSEDILRIRNHSTHTKN
GSPQKGYEKFEFNIEDCRKFIDFYKQSISKHPEWK
DFGFRFSDTQRYNSIDEFYREVENQGYKLTFENIS
ESYIDSVVNQGKLYLFQIYNKDFSAYSKGRPNLHT
LYWKALFDERNLQDVVYKLNGEAELFYRKQSIPKK
ITHPAKEAIANKNKDNPKKESVFEYDLIKDKRFTE
DKFFFHCPITINFKSSGANKFNDEINLLLKEKAND
VHILSIDRGERHLAYYTLVDGKGNIIKQDTFNIIG
NDRMKTNYHDKLAAIEKDRDSARKDWKKINNIKEM
KEGYLSQVVHEIAKLVIEYNAIVVFADLNFGFKRG
RFKVEKQVYQKLEKMLIEKLNYLVFKDNEFDKTGG
VLRAYQLTAPFETFKKMGKQTGIIYYVPAGFTSKI
CPVTGFVNQLYPKYESVSKSQEFFSKFDKICYNLD
KGYFEFSFDYKNFGDKAAKGKWTIASFGSRLINFR
NSDKNHNWDTREVYPTKELEKLLKDYSIEYGHGEC
IKAAICGESDKKFFAKLTSVLNTILQMRNSKTGTE
LDYLISPVADVNGNFFDSRQAPKNMPQDADANGAY
HIGLKGLMLLGRIKNNQEGKKLNLVIKNEEYFEFV
QNRNN

Francisella novicida Cpf1 D1255A (D917, E1006, and A1255 are bolded and underlined)

MSIYQEFVNKYSLSKTLRFELIPQGKTLENIKARG
LILDDEKRAKDYKKAKQIIDKYHQEFIEEILSSVC
ISEDLLQNYSDVYFKLKKSDDDNLQKDFKSAKDTI
KKQISEYIKDSEKFKNLFNQNLIDAKKGQESDLIL
WLKQSKDNGIELFKANSDITDIDEALEIIKSFKGW
TTYFKGFHENRKNVYSSNDIPTSIIYRIVDDNLPK
FLENKAKYESLKDKAPEAINYEQIKKDLAEELTFD
IDYKTSEVNQRVFSLDEVFEIANFNNYLNQSGITK
FNTIIGGKFVNGENTKRKGINEYINLYSQQINDKT
LKKYKMSVLFKQILSDTESKSFVIDKLEDDSDVVT
TMQSFYEQIAAFKTVEEKSIKETLSLLFDDLKAQK
LDLSKIYFKNDKSLTDLSQQVFDDYSVIGTAVLEY
ITQQIAPKNLDNPSKKEQELIAKKTEKAKYLSLET
IKLALEEFNKHRDIDKQCRFEEILANFAAIPMIFD
EIAQNKDNLAQISIKYQNQGKKDLLQASAEDDVKA
IKDLLDQTNNLLHKLKIFHISQSEDKANILDKDEH
FYLVFEECYFELANIVPLYNKIRNYITQKPYSDEK
FKLNFENSTLANGWDKNKEPDNTAILFIKDDKYYL
GVMNKKNNKIFDDKAIKENKGEGYKKIVYKLLPGA
NKMLPKVFFSAKSIKFYNPSEDILRIRNHSTHTKN
GSPQKGYEKFEFNIEDCRKFIDFYKQSISKHPEWK
DFGFRFSDTQRYNSIDEFYREVENQGYKLTFENIS
ESYIDSVVNQGKLYLFQIYNKDFSAYSKGRPNLHT
LYWKALFDERNLQDVVYKLNGEAELFYRKQSIPKK
ITHPAKEAIANKNKDNPKKESVFEYDLIKDKRFTE
DKFFFHCPITINFKSSGANKFNDEINLLLKEKAND
VHILSIDRGERHLAYYTLVDGKGNIIKQDTFNIIG
NDRMKTNYHDKLAAIEKDRDSARKDWKKINNIKEM
KEGYLSQVVHEIAKLVIEYNAIVVFEDLNFGFKRG
RFKVEKQVYQKLEKMLIEKLNYLVFKDNEFDKTGG
VLRAYQLTAPFETFKKMGKQTGIIYYVPAGFTSKI
CPVTGFVNQLYPKYESVSKSQEFFSKFDKICYNLD
KGYFEFSFDYKNFGDKAAKGKWTIASFGSRLINFR
NSDKNHNWDTREVYPTKELEKLLKDYSIEYGHGEC
IKAAICGESDKKFFAKLTSVLNTILQMRNSKTGTE
LDYLISPVADVNGNFFDSRQAPKNMPQDAAANGAY
HIGLKGLMLLGRIKNNQEGKKLNLVIKNEEYFEFV
QNRNN

Francisella novicida Cpf1 D917A/E1006A (A917, A1006, and D1255 are bolded and underlined)

MSIYQEFVNKYSLSKTLRFELIPQGKTLENIKARGL
ILDDEKRAKDYKKAKQIIDKYHQFFIEEILSSVCI
SEDLLQNYSDVYFKLKKSDDDNLQKDFKSAKDTIK
KQISEYIKDSEKFKNLFNQNLIDAKKGQESDLILW
LKQSKDNGIELFKANSDITDIDEALEIIKSFKGWT
TYFKGFHENRKNVYSSNDIPTSIIYRIVDDNLPKF
LENKAKYESLKDKAPEAINYEQIKKDLAEELTFDI
DYKTSEVNQRVFSLDEVFEIANFNNYLNQSGITKF
NTIIGGKFVNGENTKRKGINEYINLYSQQINDKTL
KKYKMSVLFKQILSDTESKSFVIDKLEDDSDVVTT
MQSFYEQIAAFKTVEEKSIKETLSLLFDDLKAQKL
DLSKIYFKNDKSLTDLSQQVFDDYSVIGTAVLEYI
TQQIAPKNLDNPSKKEQELIAKKTEKAKYLSLETI
KLALEEFNKHRDIDKQCRFEEILANFAAIPMIFDE
IAQNKDNLAQISIKYQNQGKKDLLQASAEDDVKAI
KDLLDQTNNLLHKLKIFHISQSEDKANILDKDEHF
YLVFEECYFELANIVPLYNKIRNYITQKPYSDEKF
KLNFENSTLANGWDKNKEPDNTAILFIKDDKYYLG
VMNKKNNKIFDDKAIKENKGEGYKKIVYKLLPGAN
KMLPKVFFSAKSIKFYNPSEDILRIRNHSTHTKNG
SPQKGYEKFEFNIEDCRKFIDFYKQSISKHPEWKD
FGFRFSDTQRYNSIDEFYREVENQGYKLTFENISE
SYIDSVVNQGKLYLFQIYNKDFSAYSKGRPNLHTL
YWKALFDERNLQDVVYKLNGEAELFYRKQSIPKKI
THPAKEAIANKNKDNPKKESVFEYDLIKDKRFTED
KFFFHCPITINFKSSGANKFNDEINLLLKEKANDV
HILSIARGERHLAYYTLVDGKGNIIKQDTFNIIGN
DRMKTNYHDKLAAIEKDRDSARKDWKKINNIKEMK
EGYLSQVVHEIAKLVIEYNAIVVFADLNFGFKRGR
FKVEKQVYQKLEKMLIEKLNYLVFKDNEFDKTGGV
LRAYQLTAPFETFKKMGKQTGIIYYVPAGFTSKIC
PVTGFVNQLYPKYESVSKSQEFFSKFDKICYNLDK
GYFEFSFDYKNFGDKAAKGKWTIASFGSRLINFRN
SDKNHNWDTREVYPTKELEKLLKDYSIEYGHGECI
KAAICGESDKKFFAKLTSVLNTILQMRNSKTGTEL
DYLISPVADVNGNFFDSRQAPKNMPQDADANGAYH
IGLKGLMLLGRIKNNQEGKKLNLVIKNEEYFEFVQ
NRNN

Francisella novicida Cpf1 D917A/D1255A (A917, E1006, and A1255 are bolded and underlined)

MSIYQEEVNKYSLSKTLRFELIPQGKTLENIKARG
LILDDEKRAKDYKKAKQIIDKYHQEFIEEILSSVC
ISEDLLQNYSDVYFKLKKSDDDNLQKDFKSAKDTI
KKQISEYIKDSEKFKNLFNQNLIDAKKGQESDLIL
WLKQSKDNGIELFKANSDITDIDEALEIIKSFKGW
TTYFKGFHENRKNVYSSNDIPTSIIYRIVDDNLPK
FLENKAKYESLKDKAPEAINYEQIKKDLAEELTFD
IDYKTSEVNQRVFSLDEVFEIANFNNYLNQSGITK
FNTIIGGKFVNGENTKRKGINEYINLYSQQINDKT
LKKYKMSVLFKQILSDTESKSFVIDKLEDDSDVVT
TMQSFYEQIAAFKTVEEKSIKETLSLLFDDLKAQK
LDLSKIYFKNDKSLTDLSQQVFDDYSVIGTAVLEY
ITQQIAPKNLDNPSKKEQELIAKKTEKAKYLSLET
IKLALEEFNKHRDIDKQCRFEEILANFAAIPMIFD
EIAQNKDNLAQISIKYQNQGKKDLLQASAEDDVKA
IKDLLDQTNNLLHKLKIFHISQSEDKANILDKDEH
FYLVFEECYFELANIVPLYNKIRNYITQKPYSDEK
FKLNFENSTLANGWDKNKEPDNTAILFIKDDKYYL
GVMNKKNNKIFDDKAIKENKGEGYKKIVYKLLPGA
NKMLPKVFFSAKSIKFYNPSEDILRIRNHSTHTKN
GSPQKGYEKFEFNIEDCRKFIDFYKQSISKHPEWK
DFGFRFSDTQRYNSIDEFYREVENQGYKLTFENIS
ESYIDSVVNQGKLYLFQIYNKDFSAYSKGRPNLHT
LYWKALFDERNLQDVVYKLNGEAELFYRKQSIPKK
ITHPAKEAIANKNKDNPKKESVFEYDLIKDKRFTE
DKFFFHCPITINFKSSGANKFNDEINLLLKEKAND
VHILSIARGERHLAYYTLVDGKGNIIKQDTFNIIG
NDRMKTNYHDKLAAIEKDRDSARKDWKKINNIKEM
KEGYLSQVVHEIAKLVIEYNAIVVFEDLNFGFKRG
RFKVEKQVYQKLEKMLIEKLNYLVFKDNEFDKTGG
VLRAYQLTAPFETFKKMGKQTGIIYYVPAGFTSKI
CPVTGFVNQLYPKYESVSKSQEFFSKFDKICYNLD
KGYFEFSFDYKNFGDKAAKGKWTIASFGSRLINFR
NSDKNHNWDTREVYPTKELEKLLKDYSIEYGHGEC
IKAAICGESDKKFFAKLTSVLNTILQMRNSKTGTE
LDYLISPVADVNGNFFDSRQAPKNMPQDAAANGAY
HIGLKGLMLLGRIKNNQEGKKLNLVIKNEEYFEFV
QNRNN

Francisella novicida Cpf1 E1006A/D1255A (D917, A1006, and A1255 are bolded and underlined)

MSIYQEFVNKYSLSKTLRFELIPQGKTLENIKARG
LILDDEKRAKDYKKAKQIIDKYHQEFIEEILSSVC
ISEDLLQNYSDVYFKLKKSDDDNLQKDFKSAKDTI
KKQISEYIKDSEKFKNLFNQNLIDAKKGQESDLIL
WLKQSKDNGIELFKANSDITDIDEALEIIKSFKGW
TTYFKGFHENRKNVYSSNDIPTSIIYRIVDDNLPK
FLENKAKYESLKDKAPEAINYEQIKKDLAEELTFD
IDYKTSEVNQRVFSLDEVFEIANFNNYLNQSGITK
FNTIIGGKFVNGENTKRKGINEYINLYSQQINDKT
LKKYKMSVLFKQILSDTESKSFVIDKLEDDSDVVT
TMQSFYEQIAAFKTVEEKSIKETLSLLFDDLKAQK
LDLSKIYFKNDKSLTDLSQQVFDDYSVIGTAVLEY
ITQQIAPKNLDNPSKKEQELIAKKTEKAKYLSLET
IKLALEEFNKHRDIDKQCRFEEILANFAAIPMIFD
EIAQNKDNLAQISIKYQNQGKKDLLQASAEDDVKA
IKDLLDQTNNLLHKLKIFHISQSEDKANILDKDEH
FYLVFEECYFELANIVPLYNKIRNYITQKPYSDEK
FKLNFENSTLANGWDKNKEPDNTAILFIKDDKYYL
GVMNKKNNKIFDDKAIKENKGEGYKKIVYKLLPGA
NKMLPKVFFSAKSIKFYNPSEDILRIRNHSTHTKN
GSPQKGYEKFEFNIEDCRKFIDFYKQSISKHPEWK
DFGFRFSDTQRYNSIDEFYREVENQGYKLTFENIS
ESYIDSVVNQGKLYLFQIYNKDFSAYSKGRPNLHT
LYWKALFDERNLQDVVYKLNGEAELFYRKQSIPKK
ITHPAKEAIANKNKDNPKKESVFEYDLIKDKRFTE
DKFFFHCPITINFKSSGANKFNDEINLLLKEKAND
VHILSIDRGERHLAYYTLVDGKGNIIKQDTFNIIG
NDRMKTNYHDKLAAIEKDRDSARKDWKKINNIKEM
KEGYLSQVVHEIAKLVIEYNAIVVFADLNFGFKRG
RFKVEKQVYQKLEKMLIEKLNYLVFKDNEFDKTGG
VLRAYQLTAPFETFKKMGKQTGIIYYVPAGFTSKI
CPVTGFVNQLYPKYESVSKSQEFFSKFDKICYNLD
KGYFEFSFDYKNFGDKAAKGKWTIASFGSRLINFR
NSDKNHNWDTREVYPTKELEKLLKDYSIEYGHGEC
IKAAICGESDKKFFAKLTSVLNTILQMRNSKTGTE
LDYLISPVADVNGNFFDSRQAPKNMPQDAAANGAY
HIGLKGLMLLGRIKNNQEGKKLNLVIKNEEYFEFV
QNRNN

Francisella novicida Cpf1 D917A/E1006A/D1255A (A917, A1006, and A1255 are bolded and underlined)

MSIYQEFVNKYSLSKTLRFELIPQGKTLENIKARG
LILDDEKRAKDYKKAKQIIDKYHQEFIEEILSSVC
ISEDLLQNYSDVYFKLKKSDDDNLQKDFKSAKDTI
KKQISEYIKDSEKFKNLFNQNLIDAKKGQESDLIL
WLKQSKDNGIELFKANSDITDIDEALEIIKSFKGW
TTYFKGFHENRKNVYSSNDIPTSIIYRIVDDNLPK
FLENKAKYESLKDKAPEAINYEQIKKDLAEELTFD
IDYKTSEVNQRVFSLDEVFEIANFNNYLNQSGITK
FNTIIGGKFVNGENTKRKGINEYINLYSQQINDKT
LKKYKMSVLFKQILSDTESKSFVIDKLEDDSDVVT
TMQSFYEQIAAFKTVEEKSIKETLSLLFDDLKAQK
LDLSKIYFKNDKSLTDLSQQVFDDYSVIGTAVLEY
ITQQIAPKNLDNPSKKEQELIAKKTEKAKYLSLET
IKLALEEFNKHRDIDKQCRFEEILANFAAIPMIFD
EIAQNKDNLAQISIKYQNQGKKDLLQASAEDDVKA
IKDLLDQTNNLLHKLKIFHISQSEDKANILDKDEH
FYLVFEECYFELANIVPLYNKIRNYITQKPYSDEK
FKLNFENSTLANGWDKNKEPDNTAILFIKDDKYYL
GVMNKKNNKIFDDKAIKENKGEGYKKIVYKLLPGA
NKMLPKVFFSAKSIKFYNPSEDILRIRNHSTHTKN
GSPQKGYEKFEFNIEDCRKFIDFYKQSISKHPEWK
DFGFRFSDTQRYNSIDEFYREVENQGYKLTFENIS
ESYIDSVVNQGKLYLFQIYNKDFSAYSKGRPNLHT
LYWKALFDERNLQDVVYKLNGEAELFYRKQSIPKK
ITHPAKEAIANKNKDNPKKESVFEYDLIKDKRFTE
DKFFFHCPITINFKSSGANKFNDEINLLLKEKAND
VHILSIARGERHLAYYTLVDGKGNIIKQDTFNIIG
NDRMKTNYHDKLAAIEKDRDSARKDWKKINNIKEM
KEGYLSQVVHEIAKLVIEYNAIVVFADLNFGFKRG
RFKVEKQVYQKLEKMLIEKLNYLVFKDNEFDKTGG
VLRAYQLTAPFETFKKMGKQTGIIYYVPAGFTSKI
CPVTGFVNQLYPKYESVSKSQEFFSKFDKICYNLD
KGYFEFSFDYKNFGDKAAKGKWTIASFGSRLINFR
NSDKNHNWDTREVYPTKELEKLLKDYSIEYGHGEC
IKAAICGESDKKFFAKLTSVLNTILQMRNSKTGTE
LDYLISPVADVNGNEFDSRQAPKNMPQDAAANGAY
HIGLKGLMLLGRIKNNQEGKKLNLVIKNEEYFEFV
QNRNN

[0313] In some embodiments, one of the Cas9 domains present in the fusion protein may be replaced with a guide nucleotide sequence-programmable DNA-binding protein domain that has no requirements for a PAM sequence.

[0314] In some embodiments, the Cas9 domain is a Cas9 domain from Staphylococcus aureus (SaCas9). In some embodiments, the SaCas9 domain is a nuclease active SaCas9, a nuclease inactive SaCas9 (SaCas9d), or a SaCas9 nickase (SaCas9n). In some embodiments, the SaCas9 comprises a N579A mutation, or a corresponding mutation in any of the amino acid sequences provided herein.

[0315] In some embodiments, the SaCas9 domain, the SaCas9d domain, or the SaCas9n domain can bind to a nucleic acid sequence having a non-canonical PAM. In some embodiments, the SaCas9 domain, the SaCas9d domain, or the SaCas9n domain can bind to a nucleic acid sequence having a NNGRRT or a NNGRRT PAM sequence. In some embodiments, the SaCas9 domain comprises one or more of a E781X, a N967X, and a R1014X mutation, or a corresponding mutation in any of the amino acid sequences provided herein, wherein X is any amino acid. In some embodiments, the SaCas9 domain comprises one or more of a E781K, a N967K, and a R1014H mutation, or one or more corresponding mutation in any of the amino acid sequences provided herein. In some embodiments, the SaCas9 domain comprises a E781K, a N967K, or a R1014H mutation, or corresponding mutations in any of the amino acid sequences provided herein.

### Exemplary SaCas9 Sequence

KRNYILGLDIGITSVGYGIIDYETRDVIDAGVRLF
KEANVENNEGRRSKRGARRLKRRRRHRIQRVKKLL
FDYNLLTDHSELSGINPYEARVKGLSQKLSEEEFS
AALLHLAKRRGVHNVNEVEEDTGNELSTKEQISRN
SKALEEKYVAELQLERLKKDGEVRGSINRFKTSDY
VKEAKQLLKVQKAYHQLDQSFIDTYIDLLETRRTY
YEGPGEGSPFGWKDIKEWYEMLMGHCTYFPEELRS
VKYAYNADLYNALNDLNNLVITRDENEKLEYYEKF
QIIENVFKQKKKPTLKQIAKEILVNEEDIKGYRVT
STGKPEFTNLKVYHDIKDITARKEIIENAELLDQI
AKILTIYQSSEDIQEELTNLNSELTQEEIEQISNL
KGYTGTHNLSLKAINLILDELWHTNDNQIAIFNRL
KLVPKKVDLSQQKEIPTTLVDDFILSPWKRSFIQS
IKVINAIIKKYGLPNDIIIELAREKNSKDAQKMIN
EMQKRNRQTNERIEEIIRTTGKENAKYLIEKIKLH
DMQEGKCLYSLEAIPLEDLLNNPFNYEVDHIIPRS
VSFDNSFNNKVLVKQEENSKKGNRTPFQYLSSSDS
KISYETFKKHILNLAKGKGRISKTKKEYLLEERDI
NRFSVQKDFINRNLVDTRYATRGLMNLLRSYFRVN
NLDVKVKSINGGFTSFLRRKWKFKKERNKGYKHHA
EDALIIANADFIFKEWKKLDKAKKVMENQMFEEKQ
AESMPEIETEQEYKEIFITPHQIKHIKDFKDYKYS
HRVDKKPNRELINDTLYSTRKDDKGNTLIVNNLNG
LYDKDNDKLKKLINKSPEKLLMYHHDPQTYQKLKL
IMEQYGDEKNPLYKYYEETGNYLTKYSKKDNGPVI
KKIKYYGNKLNAHLDITDDYPNSRNKVVKLSLKPY
RFDVYLDNGVYKFVTVKNLDVIKKENYYEVNSKCY
EEAKKLKKISNQAEFIASFYNNDLIKINGELYRVI
GVNNDLLNRIEVNMIDITYREYLENMNDKRPPRII
KTIASKTQSIKKYSTDILGNLYEVKSKKHPQIIKKG

[0317] Residue N579 above, which is underlined and in bold, may be mutated (e.g., to a A579) to yield a SaCas9 nickase.

### Exemplary SaCas9n Sequence

KRNYILGLDIGITSVGYGIIDYETRDVIDAGVRLF
KEANVENNEGRRSKRGARRLKRRRRHRIQRVKKLL
FDYNLLTDHSELSGINPYEARVKGLSQKLSEEEFS
AALLHLAKRRGVHNVNEVEEDTGNELSTKEQISRN
SKALEEKYVAELQLERLKKDGEVRGSINRFKTSDY
VKEAKQLLKVQKAYHQLDQSFIDTYIDLLETRRTY
YEGPGEGSPFGWKDIKEWYEMLMGHCTYFPEELRS
VKYAYNADLYNALNDLNNLVITRDENEKLEYYEKF
QIIENVFKQKKKPTLKQIAKEILVNEEDIKGYRVT
STGKPEFTNLKVYHDIKDITARKEIIENAELLDQI
AKILTIYQSSEDIQEELTNLNSELTQEEIEQISNL
KGYTGTHNLSLKAINLILDELWHTNDNQIAIFNRL
KLVPKKVDLSQQKEIPTTLVDDFILSPVVKRSFIQ
SIKVINAIIKKYGLPNDIIIELAREKNSKDAQKMI
NEMQKRNRQTNERIEEIIRTTGKENAKYLIEKIKL
HDMQEGKCLYSLEAIPLEDLLNNPFNYEVDHIIPR
SVSFDNSFNNKVLVKQEEASKKGNRTPFQYLSSSD
SKISYETFKKHILNLAKGKGRISKTKKEYLLEERD
INRFSVQKDFINRNLVDTRYATRGLMNLLRSYFRV
NNLDVKVKSINGGFTSFLRRKWKFKKERNKGYKHH
AEDALIIANADFIFKEWKKLDKAKKVMENQMFEEK
QAESMPEIETEQEYKEIFITPHQIKHIKDFKDYKY
SHRVDKKPNRELINDTLYSTRKDDKGNTLIVNNLN
GLYDKDNDKLKKLINKSPEKLLMYHHDPQTYQKLK
LIMEQYGDEKNPLYKYYEETGNYLTKYSKKDNGPV
IKKIKYYGNKLNAHLDITDDYPNSRNKVVKLSLKP
YRFDVYLDNGVYKFVTVKNLDVIKKENYYEVNSKC
YEEAKKLKKISNQAEFIASFYNNDLIKINGELYRV
IGVNNDLLNRIEVNMIDITYREYLENMNDKRPPRI
IKTIASKTQSIKKYSTDILGNLYEVKSKKHPQIIK
KG

[0319] Residue A579 above, which can be mutated from N579 to yield a SaCas9 nickase, is underlined and in bold.

### Exemplary SaKKH Cas9

KRNYILGLDIGITSVGYGIIDYETRDVIDAGVRLF
KEANVENNEGRRSKRGARRLKRRRRHRIQRVKKLL
FDYNLLTDHSELSGINPYEARVKGLSQKLSEEEFS
AALLHLAKRRGVHNVNEVEEDTGNELSTKEQISRN
SKALEEKYVAELQLERLKKDGEVRGSINRFKTSDY
VKEAKQLLKVQKAYHQLDQSFIDTYIDLLETRRTY
YEGPGEGSPFGWKDIKEWYEMLMGHCTYFPEELRS
VKYAYNADLYNALNDLNNLVITRDENEKLEYYEKF
QIIENVFKQKKKPTLKQIAKEILVNEEDIKGYRVT
STGKPEFTNLKVYHDIKDITARKEIIENAELLDQI
AKILTIYQSSEDIQEELTNLNSELTQEEIEQISNL
KGYTGTHNLSLKAINLILDELWHTNDNQIAIFNRL
KLVPKKVDLSQQKEIPTTLVDDFILSPVVKRSFIQ
SIKVINAIIKKYGLPNDIIIELAREKNSKDAQKMI
NEMQKRNRQTNERIEEIIRTTGKENAKYLIEKIKL
HDMQEGKCLYSLEAIPLEDLLNNPFNYEVDHIIPR
SVSFDNSFNNKVLVKQEEASKKGNRTPFQYLSSSD
SKISYETFKKHILNLAKGKGRISKTKKEYLLEERD
INRFSVQKDFINRNLVDTRYATRGLMNLLRSYFRV
NNLDVKVKSINGGFTSFLRRKWKFKKERNKGYKHH
AEDALIIANADFIFKEWKKLDKAKKVMENQMFEEK
QAESMPEIETEQEYKEIFITPHQIKHIKDFKDYKY
SHRVDKKPNRKLINDTLYSTRKDDKGNTLIVNNLN
GLYDKDNDKLKKLINKSPEKLLMYHHDPQTYQKLK
LIMEQYGDEKNPLYKYYEETGNYLTKYSKKDNGPV
IKKIKYYGNKLNAHLDITDDYPNSRNKVVKLSLKP
YRFDVYLDNGVYKFVTVKNLDVIKKENYYEVNSKC
YEEAKKLKKISNQAEFIASFYKNDLIKINGELYRV
IGVNNDLLNRIEVNMIDITYREYLENMNDKRPPHI
IKTIASKTQSIKKYSTDILGNLYEVKSKKHPQIIK
KG.

[0321] Residue A579 above, which can be mutated from N579 to yield a SaCas9 nickase, is underlined and in bold. Residues K781, K967, and H1014 above, which can be mutated from E781, N967, and R1014 to yield a SaKKH Cas9 are underlined and in italics.

[0322] In some embodiments, the napDNAbp is a circular permutant. In the following sequences, the plain text denotes an adenosine deaminase sequence, bold sequence indicates sequence derived from Cas9, the italicized sequence denotes a linker sequence, and the underlined sequence denotes a bipartite nuclear localization sequence, and double underlined sequence indicates mutations.

CP5 (with MSP “NGC” PID and “D10A” Nickase):

EIGKATAKYFFYSNIMNFFKTEITLANGEIRKRPL
IETNGETGEIVWDKGRDFATVRKVLSMPQVNIVKK
TEVQTGGFSKESILPKRNSDKLIARKKDWDPKKYG
GFMQPTVAYSVLVVAKVEKGKSKKLKSVKELLGIT
IMERSSFEKNPIDFLEAKGYKEVKKDLIIKLPKYS
LFELENGRKRMLASAKFLQKGNELALPSKYVNFLY
LASHYEKLKGSPEDNEQKQLFVEQHKHYLDEIIEQ
ISEFSKRVILADANLDKVLSAYNKHRDKPIREQAE
NIIHLFTLTNLGAPRAFKYFDTTIARKEYRSTKEV
LDATLIHQSITGLYETRIDLSQLGGDGGSGGSGGS
GGSGGSGGSGGMDKKYSIGLAIGTNSVGWAVITDE
YKVPSKKFKVLGNTDRHSIKKNLIGALLFDSGETA
EATRLKRTARRRYTRRKNRICYLQEIFSNEMAKVD
DSFFHRLEESFLVEEDKKHERHPIFGNIVDEVAYH
EKYPTIYHLRKKLVDSTDKADLRLIYLALAHMIKF
RGHFLIEGDLNPDNSDVDKLFIQLVQTYNQLFEEN
PINASGVDAKAILSARLSKSRRLENLIAQLPGEKK
NGLFGNLIALSLGLTPNFKSNFDLAEDAKLQLSKD
TYDDDLDNLLAQIGDQYADLFLAAKNLSDAILLSD
ILRVNTEITKAPLSASMIKRYDEHHQDLTLLKALV
RQQLPEKYKEIFFDQSKNGYAGYIDGGASQEEFYK
FIKPILEKMDGTEELLVKLNREDLLRKQRTFDNGS
IPHQIHLGELHAILRRQEDFYPFLKDNREKIEKIL
TFRIPYYVGPLARGNSRFAWMTRKSEETITPWNFE
EVVDKGASAQSFIERMTNFDKNLPNEKVLPKHSLL
YEYFTVYNELTKVKYVTEGMRKPAFLSGEQKKAIV
DLLFKTNRKVTVKQLKEDYFKKIECFDSVEISGVE
DRFNASLGTYHDLLKIIKDKDFLDNEENEDILEDI
VLTLTLFEDREMIEERLKTYAHLFDDKVMKQLKRR
RYTGWGRLSRKLINGIRDKQSGKTILDFLKSDGFA
NRNFMQLIHDDSLTFKEDIQKAQVSGQGDSLHEHI
ANLAGSPAIKKGILQTVKVVDELVKVMGRHKPENI
VIEMARENQTTQKGQKNSRERMKRIEEGIKELGSQ
ILKEHPVENTQLQNEKLYLYYLQNGRDMYVDQELD
INRLSDYDVDHIVPQSFLKDDSIDNKVLTRSDKNR
GKSDNVPSEEVVKKMKNYWRQLLNAKLITQRKFDN
LTKAERGGLSELDKAGFIKRQLVETRQITKHVAQI
LDSRMNTKYDENDKLIREVKVITLKSKLVSDFRKD
FQFYKVREINNYHHAHDAYLNAWGTALIKKYPKLE
SEFVYGDYKVYDVRKMIAKSEQEGADKRTADGSEF
ESPKKKRKV*

[0323] In some embodiments, the nucleic acid programmable DNA binding protein (napDNAbp) is a single effector of a microbial CRISPR-Cas system. Single effectors of microbial CRISPR-Cas systems include, without limitation, Cas9, Cpf1, Cas12b/C2c1, and Cas12c/C2c3. Typically, microbial CRISPR-Cas systems are divided into Class 1 and Class 2 systems. Class 1 systems have multisubunit effector complexes, while Class 2 systems have a single protein effector. For example, Cas9 and Cpf1 are Class 2 effectors. In addition to Cas9 and Cpf1, three distinct Class 2 CRISPR-Cas systems (Cas12b/C2c1, and Cas12c/C2c3) have been described by Shmakov et al., “Discovery and Functional Characterization of Diverse Class 2 CRISPR Cas Systems”, Mol. Cell, 2015 Nov. 5; 60(3): 385-397, the entire contents of which is hereby incorporated by reference. Effectors of two of the systems, Cas12b/C2c1, and Cas12c/C2c3, contain RuvC-like endonuclease domains related to Cpf1. A third system contains an effector with two predicated HEPN RNase domains. Production of mature CRISPR RNA is tracrRNA-independent, unlike production of CRISPR RNA by Cas12b/C2c1. Cas12b/C2c1 depends on both CRISPR RNA and tracrRNA for DNA cleavage.

[0324] The crystal structure of Alicyclobaccillus acidoterrastris Cas12b/C2c1 (AacC2c1) has been reported in complex with a chimeric single-molecule guide RNA (sgRNA). See e.g., Liu et al., “C2c1-sgRNA Complex Structure Reveals RNA-Guided DNA Cleavage Mechanism”, Mol. Cell, 2017 Jan. 19; 65(2):310-322, the entire contents of which are hereby incorporated by reference. The crystal structure has also been reported in Alicyclobacillus acidoterrestris C2c1 bound to target DNAs as ternary complexes. See e.g., Yang et al., “PAM-dependent Target DNA Recognition and Cleavage by C2C1 CRISPR-Cas endonuclease”, Cell, 2016 Dec. 15; 167(7):1814-1828, the entire contents of which are hereby incorporated by reference. Catalytically competent conformations of AacC2c1, both with target and non-target DNA strands, have been captured independently positioned within a single RuvC catalytic pocket, with Cas12b/C2c1-mediated cleavage resulting in a staggered seven-nucleotide break of target DNA. Structural comparisons between Cas12b/C2c1 ternary complexes and previously identified Cas9 and Cpf1 counterparts demonstrate the diversity of mechanisms used by CRISPR-Cas9 systems.

[0325] In some embodiments, the nucleic acid programmable DNA binding protein (napDNAbp) of any of the fusion proteins provided herein may be a Cas12b/C2c1, or a Cas12c/C2c3 protein. In some embodiments, the napDNAbp is a Cas12b/C2c1 protein. In some embodiments, the napDNAbp is a Cas12c/C2c3 protein. In some embodiments, the napDNAbp comprises an amino acid sequence that is at least 85%, at least 90%, at least 91%, at least 92%, at least 93%, at least 94%, at least 95%, at least 96%, at least 97%, at least 98%, at least 99%, or at ease 99.5% identical to a naturally-occurring Cas12b/C2c1 or Cas12c/C2c3 protein. In some embodiments, the napDNAbp is a naturally-occurring Cas12b/C2c1 or Cas12c/C2c3 protein. In some embodiments, the napDNAbp comprises an amino acid sequence that is at least 85%, at least 90%, at least 91%, at least 92%, at least 93%, at least 94%, at least 95%, at least 96%, at least 97%, at least 98%, at least 99%, or at ease 99.5% identical to any one of the napDNAbp sequences provided herein. It should be appreciated that Cas12b/C2c1 or Cas12c/C2c3 from other bacterial species may also be used in accordance with the present disclosure.

[0326] A Cas12b/C2c1 ((uniprot.org/uniprot/T0D7A2#2) sp|T0D7A2|C2C1_ALIAG CRISPR-associated endonuclease C2c1 OS=Alicyclobacillus acido-terrestris (strain ATCC 49025/DSM 3922/CIP 106132/NCIMB 13137/GD3B) GN=c2c1 PE=1 SV=1) amino acid sequence is as follows:

MAVKSIKVKLRLDDMPEIRAGLWKLHKEVNAGVRY
YTEWLSLLRQENLYRRSPNGDGEQECDKTAEECKA
ELLERLRARQVENGHRGPAGSDDELLQLARQLYEL
LVPQAIGAKGDAQQIARKELSPLADKDAVGGLGIA
KAGNKPRWVRMREAGEPGWEEEKEKAETRKSADRT
ADVLRALADFGLKPLMRVYTDSEMSSVEWKPLRKG
QAVRTWDRDMFQQAIERMMSWESWNQRVGQEYAKL
VEQKNRFEQKNFVGQEHLVHLVNQLQQDMKEASPG
LESKEQTAHYVTGRALRGSDKVFEKWGKLAPDAPF
DLYDAEIKNVQRRNTRRFGSHDLFAKLAEPEYQAL
WREDASFLTRYAVYNSILRKLNHAKMFATFTLPDA
TAHPIWTRFDKLGGNLHQYTFLFNEFGERRHAIRF
HKLLKVENGVAREVDDVTVPISMSEQLDNLLPRDP
NEPIALYFRDYGAEQHFTGEFGGAKIQCRRDQLAH
MHRRRGARDVYLNVSVRVQSQSEARGERRPPYAAV
FRLVGDNHRAFVHFDKLSDYLAEHPDDGKLGSEGL
LSGLRVMSVDLGLRTSASISVFRVARKDELKPNSK
GRVPFFFPIKGNDNLVAVHERSQLLKLPGETESKD
LRAIREERQRTLRQLRTQLAYLRLLVRCGSEDVGR
RERSWAKLIEQPVDAANHMTPDWREAFENELQKLK
SLHGICSDKEWMDAVYESVRRVWRHMGKQVRDWRK
DVRSGERPKIRGYAKDVVGGNSIEQIEYLERQYKF
LKSWSFFGKVSGQVIRAEKGSRFAITLREHIDHAK
EDRLKKLADRIIMEALGYVYALDERGKGKWVAKYP
PCQLILLEELSEYQFNNDRPPSENNQLMQWSHRGV
FQELINQAQVHDLLVGTMYAAFSSRFDARTGAPGI
RCRRVPARCTQEHNPEPFPWWLNKFVVEHTLDACP
LRADDLIPTGEGEIFVSPFSAEEGDFHQIHADLNA
AQNLQQRLWSDFDISQIRLRCDWGEVDGELVLIPR
LTGKRTADSYSNKVFYTNTGVTYYERERGKKRRKV
FAQEKLSEEEAELLVEADEAREKSVVLMRDPSGII
NRGNWTRQKEFWSMVNQRIEGYLVKQIRSRVPLQD
SACENTGDI

AacCas12b (Alicyclobacillus acidiphilus)—WP_067623834

MAVKSMKVKLRLDNMPEIRAGLWKLHTEVNAGVRY
YTEWLSLLRQENLYRRSPNGDGEQECYKTAEECKA
ELLERLRARQVENGHCGPAGSDDELLQLARQLYEL
LVPQAIGAKGDAQQIARKELSPLADKDAVGGLGIA
KAGNKPRWVRMREAGEPGWEEEKAKAEARKSTDRT
ADVLRALADFGLKPLMRVYTDSDMSSVQWKPLRKG
QAVRTWDRDMFQQAIERMMSWESWNQRVGEAYAKL
VEQKSRFEQKNFVGQEHLVQLVNQLQQDMKEASHG
LESKEQTAHYLTGRALRGSDKVFEKWEKLDPDAPF
DLYDTEIKNVQRRNTRRFGSHDLFAKLAEPKYQAL
WREDASFLTRYAVYNSIVRKLNHAKMFATFTLPDA
TAHPIWTRFDKLGGNLHQYTFLFNEFGEGRHAIRF
QKLLTVEDGVAKEVDDVTVPISMSAQLDDLLPRDP
HELVALYFQDYGAEQHLAGEFGGAKIQYRRDQLNH
LHARRGARDVYLNLSVRVQSQSEARGERRPPYAAV
FRLVGDNHRAFVHFDKLSDYLAEHPDDGKLGSEGL
LSGLRVMSVDLGLRTSASISVFRVARKDELKPNSE
GRVPFCFPIEGNENLVAVHERSQLLKLPGETESKD
LRAIREERQRTLRQLRTQLAYLRLLVRCGSEDVGR
RERSWAKLIEQPMDANQMTPDWREAFEDELQKLKS
LYGICGDREWTEAVYESVRRVWRHMGKQVRDWRKD
VRSGERPKIRGYQKDVVGGNSIEQIEYLERQYKFL
KSWSFFGKVSGQVIRAEKGSRFAITLREHIDHAKE
DRLKKLADRIIMEALGYVYALDDERGKGKWVAKYP
PCQLILLEELSEYQFNNDRPPSENNQLMQWSHRGV
FQELLNQAQVHDLLVGTMYAAFSSRFDARTGAPGI
RCRRVPARCAREQNPEPFPWWLNKFVAEHKLDGCP
LRADDLIPTGEGEFFVSPFSAEEGDFHQIHADLNA
AQNLQRRLWSDFDISQIRLRCDWGEVDGEPVLIPR
TTGKRTADSYGNKVFYTKTGVTYYERERGKKRRKV
FAQEELSEEEAELLVEADEAREKSVVLMRDPSGII
NRGDWTRQKEFWSMVNQRIEGYLVKQIRSRVRLQE
SACENTGDI

BhCas12b (Bacillus hisashii) NCBI Reference Sequence: WP_095142515

MAPKKKRKVGIHGVPAAATRSFILKIEPNEEVKKG
LWKTHEVLNHGIAYYMNILKLIRQEAIYEHHEQDP
KNPKKVSKAEIQAELWDFVLKMQKCNSFTHEVDKD
EVFNILRELYEELVPSSVEKKGEANQLSNKFLYPL
VDPNSQSGKGTASSGRKPRWYNLKIAGDPSWEEEK
KKWEEDKKKDPLAKILGKLAEYGLIPLFIPYTDSN
EPIVKEIKWMEKSRNQSVRRLDKDMFIQALERFLS
WESWNLKVKEEYEKVEKEYKTLEERIKEDIQALKA
LEQYEKERQEQLLRDTLNTNEYRLSKRGLRGWREI
IQKWLKMDENEPSEKYLEVFKDYQRKHPREAGDYS
VYEFLSKKENHFIWRNHPEYPYLYATFCEIDKKKK
DAKQQATFTLADPINHPLWVRFEERSGSNLNKYRI
LTEQLHTEKLKKKLTVQLDRLIYPTESGGWEEKGK
VDIVLLPSRQFYNQIFLDIEEKGKHAFTYKDESIK
FPLKGTLGGARVQFDRDHLRRYPHKVESGNVGRIY
FNMTVNIEPTESPVSKSLKIHRDDFPKVVNFKPKE
LTEWIKDSKGKKLKSGIESLEIGLRVMSIDLGQRQ
AAAASIFEVVDQKPDIEGKLFFPIKGTELYAVHRA
SFNIKLPGETLVKSREVLRKAREDNLKLMNQKLNF
LRNVLHFQQFEDITEREKRVTKWISRQENSDVPLV
YQDELIQIRELMYKPYKDWVAFLKQLHKRLEVEIG
KEVKHWRKSLSDGRKGLYGISLKNIDEIDRTRKFL
LRWSLRPTEPGEVRRLEPGQRFAIDQLNHLNALKE
DRLKKMANTIIMHALGYCYDVRKKKWQAKNPACQI
ILFEDLSNYNPYEERSRFENSKLMKWSRREIPRQV
ALQGEIYGLQVGEVGAQFSSRFHAKTGSPGIRCSV
VTKEKLQDNRFFKNLQREGRLTLDKIAVLKEGDLY
PDKGGEKFISLSKDRKCVTTHADINAAQNLQKRFW
TRTHGFYKVYCKAYQVDGQTVYIPESKDQKQKIIE
EFGEGYFILKDGVYEWVNAGKLKIKKGSSKQSSSE
LVDSDILKDSFDLASELKGEKLMLYRDPSGNVFPS
DKWMAAGVFFGKLERILISKLTNQYSISTIEDDSS
KQSMKRPAATKKAGQAKKKK

[0327] In some embodiments, the Cas12b is BvCas12b (V4), which is a variant of BhCas12b and comprises the following changes relative to BhCas12b: S893R, K846R, and E837G. BhCas12b (V4) is expressed as follows: 5′ mRNA Cap-5′UTR-bhCas12b-STOP sequence-3′UTR 120polyA tail.

### 5′UTR:

GGGAAATAAGAGAGAAAAGAAGAGTAAGAAGAAATA
TAAGAGCCACC

### 3′ UTR (TriLink Standard UTR)

GCTGGAGCCTCGGTGGCCATGCTTCTTGCCCCTTG
GGCCTCCCCCCAGCCCCTCCTCCCCTTCCTGCACC
CGTACCCCCGTGGTCTTTGAATAAAGTCTGA

Nucleic Acid Sequence of bhCas12b (V4)

ATGGCCCCAAAGAAGAAGCGGAAGGTCGGTATCCA
CGGAGTCCCAGCAGCCGCCACCAGATCCTTCATCC
TGAAGATCGAGCCCAACGAGGAAGTGAAGAAAGGC
CTCTGGAAAACCCACGAGGTGCTGAACCACGGAAT
CGCCTACTACATGAATATCCTGAAGCTGATCCGGC
AAGAGGCCATCTACGAGCACCACGAGCAGGACCCC
AAGAATCCCAAGAAGGTGTCCAAGGCCGAGATCCA
GGCCGAGCTGTGGGATTTCGTGCTGAAGATGCAGA
AGTGCAACAGCTTCACACACGAGGTGGACAAGGAC
GAGGTGTTCAACATCCTGAGAGAGCTGTACGAGGA
ACTGGTGCCCAGCAGCGTGGAAAAGAAGGGCGAAG
CCAACCAGCTGAGCAACAAGTTTCTGTACCCTCTG
GTGGACCCCAACAGCCAGTCTGGAAAGGGAACAGC
CAGCAGCGGCAGAAAGCCCAGATGGTACAACCTGA
AGATTGCCGGCGATCCCTCCTGGGAAGAAGAGAAG
AAGAAGTGGGAAGAAGATAAGAAAAAGGACCCGCT
GGCCAAGATCCTGGGCAAGCTGGCTGAGTACGGAC
TGATCCCTCTGTTCATCCCCTACACCGACAGCAAC
GAGCCCATCGTGAAAGAAATCAAGTGGATGGAAAA
GTCCCGGAACCAGAGCGTGCGGCGGCTGGATAAGG
ACATGTTCATTCAGGCCCTGGAACGGTTCCTGAGC
TGGGAGAGCTGGAACCTGAAAGTGAAAGAGGAATA
CGAGAAGGTCGAGAAAGAGTACAAGACCCTGGAAG
AGAGGATCAAAGAGGACATCCAGGCTCTGAAGGCT
CTGGAACAGTATGAGAAAGAGCGGCAAGAACAGCT
GCTGCGGGACACCCTGAACACCAACGAGTACCGGC
TGAGCAAGAGAGGCCTTAGAGGCTGGCGGGAAATC
ATCCAGAAATGGCTGAAAATGGACGAGAACGAGCC
CTCCGAGAAGTACCTGGAAGTGTTCAAGGACTACC
AGCGGAAGCACCCTAGAGAGGCCGGCGATTACAGC
GTGTACGAGTTCCTGTCCAAGAAAGAGAACCACTT
CATCTGGCGGAATCACCCTGAGTACCCCTACCTGT
ACGCCACCTTCTGCGAGATCGACAAGAAAAAGAAG
GACGCCAAGCAGCAGGCCACCTTCACACTGGCCGA
TCCTATCAATCACCCTCTGTGGGTCCGATTCGAGG
AAAGAAGCGGCAGCAACCTGAACAAGTACAGAATC
CTGACCGAGCAGCTGCACACCGAGAAGCTGAAGAA
AAAGCTGACAGTGCAGCTGGACCGGCTGATCTACC
CTACAGAATCTGGCGGCTGGGAAGAGAAGGGCAAA
GTGGACATTGTGCTGCTGCCCAGCCGGCAGTTCTA
CAACCAGATCTTCCTGGACATCGAGGAAAAGGGCA
AGCACGCCTTCACCTACAAGGATGAGAGCATCAAG
TTCCCTCTGAAGGGCACACTCGGCGGAGCCAGAGT
GCAGTTCGACAGAGATCACCTGAGAAGATACCCTC
ACAAGGTGGAAAGCGGCAACGTGGGCAGAATCTAC
TTCAACATGACCGTGAACATCGAGCCTACAGAGTC
CCCAGTGTCCAAGTCTCTGAAGATCCACCGGGACG
ACTTCCCCAAGGTGGTCAACTTCAAGCCCAAAGAA
CTGACCGAGTGGATCAAGGACAGCAAGGGCAAGAA
ACTGAAGTCCGGCATCGAGTCCCTGGAAATCGGCC
TGAGAGTGATGAGCATCGACCTGGGACAGAGACAG
GCCGCTGCCGCCTCTATTTTCGAGGTGGTGGATCA
GAAGCCCGACATCGAAGGCAAGCTGTTTTTCCCAA
TCAAGGGCACCGAGCTGTATGCCGTGCACAGAGCC
AGCTTCAACATCAAGCTGCCCGGCGAGACACTGGT
CAAGAGCAGAGAAGTGCTGCGGAAGGCCAGAGAGG
ACAATCTGAAACTGATGAACCAGAAGCTCAACTTC
CTGCGGAACGTGCTGCACTTCCAGCAGTTCGAGGA
CATCACCGAGAGAGAGAAGCGGGTCACCAAGTGGA
TCAGCAGACAAGAGAACAGCGACGTGCCCCTGGTG
TACCAGGATGAGCTGATCCAGATCCGCGAGCTGAT
GTACAAGCCTTACAAGGACTGGGTCGCCTTCCTGA
AGCAGCTCCACAAGAGACTGGAAGTCGAGATCGGC
AAAGAAGTGAAGCACTGGCGGAAGTCCCTGAGCGA
CGGAAGAAAGGGCCTGTACGGCATCTCCCTGAAGA
ACATCGACGAGATCGATCGGACCCGGAAGTTCCTG
CTGAGATGGTCCCTGAGGCCTACCGAACCTGGCGA
AGTGCGTAGACTGGAACCCGGCCAGAGATTCGCCA
TCGACCAGCTGAATCACCTGAACGCCCTGAAAGAA
GATCGGCTGAAGAAGATGGCCAACACCATCATCAT
GCACGCCCTGGGCTACTGCTACGACGTGCGGAAGA
AGAAATGGCAGGCTAAGAACCCCGCCTGCCAGATC
ATCCTGTTCGAGGATCTGAGCAACTACAACCCCTA
CGAGGAAAGGTCCCGCTTCGAGAACAGCAAGCTCA
TGAAGTGGTCCAGACGCGAGATCCCCAGACAGGTT
GCACTGCAGGGCGAGATCTATGGCCTGCAAGTGGG
AGAAGTGGGCGCTCAGTTCAGCAGCAGATTCCACG
CCAAGACAGGCAGCCCTGGCATCAGATGTAGCGTC
GTGACCAAAGAGAAGCTGCAGGACAATCGGTTCTT
CAAGAATCTGCAGAGAGAGGGCAGACTGACCCTGG
ACAAAATCGCCGTGCTGAAAGAGGGCGATCTGTAC
CCAGACAAAGGCGGCGAGAAGTTCATCAGCCTGAG
CAAGGATCGGAAGTGCGTGACCACACACGCCGACA
TCAACGCCGCTCAGAACCTGCAGAAGCGGTTCTGG
ACAAGAACCCACGGCTTCTACAAGGTGTACTGCAA
GGCCTACCAGGTGGACGGCCAGACCGTGTACATCC
CTGAGAGCAAGGACCAGAAGCAGAAGATCATCGAA
GAGTTCGGCGAGGGCTACTTCATTCTGAAGGACGG
GGTGTACGAATGGGTCAACGCCGGCAAGCTGAAAA
TCAAGAAGGGCAGCTCCAAGCAGAGCAGCAGCGAG
CTGGTGGATAGCGACATCCTGAAAGACAGCTTCGA
CCTGGCCTCCGAGCTGAAAGGCGAAAAGCTGATGC
TGTACAGGGACCCCAGCGGCAATGTGTTCCCCAGC
GACAAATGGATGGCCGCTGGCGTGTTCTTCGGAAA
GCTGGAACGCATCCTGATCAGCAAGCTGACCAACC
AGTACTCCATCAGCACCATCGAGGACGACAGCAGC
AAGCAGTCTATGAAAAGGCCGGCGGCCACGAAAAA
GGCCGGCCAGGCAAAAAAGAAAAAG

[0330] In some embodiments, the Cas12b is BvCas12B. In some embodiments, the Cas12b comprises amino acid substitutions S893R, K846R, and E837G as numbered in the BvCas12b exemplary sequence provided below.

BvCas12b (Bacillus sp. V3-13) NCBI Reference Sequence: WP_101661451.1

MAIRSIKLKMKTNSGTDSIYLRKALWRTHQLINEG
IAYYMNLLTLYRQEAIGDKTKEAYQAELINIIRNQ
QRNNGSSEEHGSDQEILALLRQLYELIIPSSIGES
GDANQLGNKFLYPLVDPNSQSGKGTSNAGRKPRWK
RLKEEGNPDWELEKKKDEERKAKDPTVKIFDNLNK
YGLLPLFPLFTNIQKDIEWLPLGKRQSVRKWDKDM
FIQAIERLLSWESWNRRVADEYKQLKEKTESYYKE
HLTGGEEWIEKIRKFEKERNMELEKNAFAPNDGYF
ITSRQIRGWDRVYEKWSKLPESASPEELWKVVAEQ
QNKMSEGFGDPKVFSFLANRENRDIWRGHSERIYH
IAAYNGLQKKLSRTKEQATFTLPDAIEHPLWIRYE
SPGGTNLNLFKLEEKQKKNYYVTLSKIIWPSEEKW
IEKENIEIPLAPSIQFNRQIKLKQHVKGKQEISFS
DYSSRISLDGVLGGSRIQFNRKYIKNHKELLGEGD
IGPVFFNLVVDVAPLQETRNGRLQSPIGKALKVIS
SDFSKVIDYKPKELMDWMNTGSASNSFGVASLLEG
MRVMSIDMGQRTSASVSIFEVVKELPKDQEQKLFY
SINDTELFAIHKRSFLLNLPGEVVTKNNKQQRQER
RKKRQFVRSQIRMLANVLRLETKKTPDERKKAIHK
LMEIVQSYDSWTASQKEVWEKELNLLTNMAAFNDE
IWKESLVELHHRIEPYVGQIVSKWRKGLSEGRKNL
AGISMWNIDELEDTRRLLISWSKRSRTPGEANRIE
TDEPFGSSLLQHIQNVKDDRLKQMANLIIMTALGF
KYDKEEKDRYKRWKETYPACQIILFENLNRYLFNL
DRSRRENSRLMKWAHRSIPRTVSMQGEMFGLQVGD
VRSEYSSRFHAKTGAPGIRCHALTEEDLKAGSNTL
KRLIEDGFINESELAYLKKGDIIPSQGGELFVTLS
KRYKKDSDNNELTVIHADINAAQNLQKRFWQQNSE
VYRVPCQLARMGEDKLYIPKSQTETIKKYFGKGSF
VKNNTEQEVYKWEKSEKMKIKTDTTFDLQDLDGFE
DISKTIELAQEQQKKYLTMFRDPSGYFFNNETWRP
QKEYWSIVNNIIKSCLKKKILSNKVEL

[0331] In some embodiments, the Cas12b is BTCas12b.BTCas12b (Bacillus thermoamylovorans) NCBI Reference Sequence: WP_041902512

MATRSFILKIEPNEEVKKGLWKTHEVLNHGIAYYM
NILKLIRQEAIYEHHEQDPKNPKKVSKAEIQAELW
DFVLKMQKCNSFTHEVDKDVVFNILRELYEELVPS
SVEKKGEANQLSNKELYPLVDPNSQSGKGTASSGR
KPRWYNLKIAGDPSWEEEKKKWEEDKKKDPLAKIL
GKLAEYGLIPLFIPFTDSNEPIVKEIKWMEKSRNQ
SVRRLDKDMFIQALERFLSWESWNLKVKEEYEKVE
KEHKTLEERIKEDIQAFKSLEQYEKERQEQLLRDT
LNTNEYRLSKRGLRGWREIIQKWLKMDENEPSEKY
LEVFKDYQRKHPREAGDYSVYEFLSKKENHFIWRN
HPEYPYLYATFCEIDKKKKDAKQQATFTLADPINH
PLWVRFEERSGSNLNKYRILTEQLHTEKLKKKLTV
QLDRLIYPTESGGWEEKGKVDIVLLPSRQFYNQIF
LDIEEKGKHAFTYKDESIKFPLKGTLGGARVQFDR
DHLRRYPHKVESGNVGRIYFNMTVNIEPTESPVSK
SLKIHRDDFPKFVNFKPKELTEWIKDSKGKKLKSG
IESLEIGLRVMSIDLGQRQAAAASIFEVVDQKPDI
EGKLFFPIKGTELYAVHRASFNIKLPGETLVKSRE
VLRKAREDNLKLMNQKLNFLRNVLHFQQFEDITER
EKRVTKWISRQENSDVPLVYQDELIQIRELMYKPY
KDWVAFLKQLHKRLEVEIGKEVKHWRKSLSDGRKG
LYGISLKNIDEIDRTRKFLLRWSLRPTEPGEVRRL
EPGQRFAIDQLNHLNALKEDRLKKMANTIIMHALG
YCYDVRKKKWQAKNPACQIILFEDLSNYNPYEERS
RFENSKLMKWSRREIPRQVALQGEIYGLQVGEVGA
QFSSRFHAKTGSPGIRCSVVTKEKLQDNRFFKNLQ
REGRLTLDKIAVLKEGDLYPDKGGEKFISLSKDRK
LVTTHADINAAQNLQKRFWTRTHGFYKVYCKAYQV
DGQTVYIPESKDQKQKIIEEFGEGYFILKDGVYEW
GNAGKLKIKKGSSKQSSSELVDSDILKDSFDLASE
LKGEKLMLYRDPSGNVEPSDKWMAAGVEFGKLERI
LISKLTNQYSISTIEDDSSKOSM

[0332] In some embodiments, a napDNAbp refers to Cas12c. In some embodiments, the Cas12c protein is a Cas12c1 or a variant of Cas12c1. In some embodiments, the Cas12 protein is a Cas12c2 or a variant of Cas12c2. In some embodiments, the Cas12 protein is a Cas12c protein from Oleiphilus sp. HI0009 (i.e., OspCas12c) or a variant of OspCas12c. These Cas12c molecules have been described in Yan et al., “Functionally Diverse Type V CRISPR-Cas Systems,” Science, 2019 Jan. 4; 363: 88-91; the entire contents of which is hereby incorporated by reference. In some embodiments, the napDNAbp comprises an amino acid sequence that is at least 85%, at least 90%, at least 91%, at least 92%, at least 93%, at least 94%, at least 95%, at least 96%, at least 97%, at least 98%, at least 99%, or at least 99.5% identical to a naturally-occurring Cas12c1, Cas12c2, or OspCas12c protein. In some embodiments, the napDNAbp is a naturally-occurring Cas12c1, Cas12c2, or OspCas12c protein. In some embodiments, the napDNAbp comprises an amino acid sequence that is at least 85%, at least 90%, at least 91%, at least 92%, at least 93%, at least 94%, at least 95%, at least 96%, at least 97%, at least 98%, at least 99%, or at ease 99.5% identical to any Cas12c1, Cas12c2, or OspCas12c protein described herein. It should be appreciated that Cas12c1, Cas12c2, or OspCas12c from other bacterial species may also be used in accordance with the present disclosure.

### Cas12c1

MQTKKTHLHLISAKASRKYRRTIACLSDTAKKDLE
RRKQSGAADPAQELSCLKTIKEKLEVPEGSKLPSF
DRISQIYNALETIEKGSLSYLLFALILSGFRIFPN
SSAAKTFASSSCYKNDQFASQIKEIFGEMVKNFIP
SELESILKKGRRKNNKDWTEENIKRVLNSEFGRKN
SEGSSALFDSFLSKFSQELFRKFDSWNEVNKKYLE
AAELLDSMLASYGPFDSVCKMIGDSDSRNSLPDKS
TIAFTNNAEITVDIESSVMPYMAIAALLREYRQSK
SKAAPVAYVQSHLTTTNGNGLSWFFKFGLDLIRKA
PVSSKQSTSDGSKSLQELFSVPDDKLDGLKFIKEA
CEALPEASLLCGEKGELLGYQDFRTSFAGHIDSWV
ANYVNRLFELIELVNQLPESIKLPSILTQKNHNLV
ASLGLQEAEVSHSLELFEGLVKNVRQTLKKLAGID
ISSSPNEQDIKEFYAFSDVLNRLGSIRNQIENAVQ
TAKKDKIDLESAIEWKEWKKLKKLPKLNGLGGGVP
KQQELLDKALESVKQIRHYQRIDFERVIQWAVNEH
CLETVPKFLVDAEKKKINKESSTDFAAKENAVRFL
LEGIGAAARGKTDSVSKAAYNWFVVNNFLAKKDLN
RYFINCQGCIYKPPYSKRRSLAFALRSDNKDTIEV
VWEKFETFYKEISKEIEKFNIFSQEFQTFLHLENL
RMKLLLRRIQKPIPAEIAFFSLPQEYYDSLPPNVA
FLALNQEITPSEYITQFNLYSSFLNGNLILLRRSR
SYLRAKFSWVGNSKLIYAAKEARLWKIPNAYWKSD
EWKMILDSNVLVFDKAGNVLPAPTLKKVCEREGDL
RLFYPLLRQLPHDWCYRNPFVKSVGREKNVIEVNK
EGEPKVASALPGSLFRLIGPAPEKSLLDDCEFNPL
DKDLRECMLIVDQEISQKVEAQKVEASLESCTYSI
AVPIRYHLEEPKVSNQFENVLAIDQGEAGLAYAVF
SLKSIGEAETKPIAVGTIRIPSIRRLIHSVSTYRK
KKQRLQNFKQNYDSTAFIMRENVTGDVCAKIVGLM
KEFNAFPVLEYDVKNLESGSRQLSAVYKAVNSHFL
YFKEPGRDALRKQLWYGGDSWTIDGIEIVTRERKE
DGKEGVEKIVPLKVFPGRSVSARFTSKTCSCCGRN
VFDWLFTEKKAKTNKKFNVNSKGELTTADGVIQLF
EADRSKGPKFYARRKERTPLTKPIAKGSYSLEEIE
RRVRTNLRRAPKSKQSRDTSQSQYFCVYKDCALHF
SGMQADENAAINIGRRFLTALRKNRRSDFPSNVKI
SDRLLDN

### Cas12c2

MTKHSIPLHAFRNSGADARKWKGRIALLAKRGKET
MRTLQEPLEMSEPEAAAINTTPFAVAYNAIEGTGK
GTLFDYWAKLHLAGFRFFPSGGAATIFRQQAVFED
ASWNAAFCQQSGKDWPWLVPSKLYERFTKAPREVA
KKDGSKKSIEFTQENVANESHVSLVGASITDKTPE
DQKEFFLKMAGALAEKFDSWKSANEDRIVAMKVID
EFLKSEGLHLPSLENIAVKCSVETKPDNATVAWHD
APMSGVQNLAIGVFATCASRIDNIYDLNGGKLSKL
IQESATTPNVTALSWLFGKGLEYFRTTDIDTIMQD
FNIPASAKESIKPLVESAQAIPTMTVLGKKNYAPF
RPNFGGKIDSWIANYASRLMLLNDILEQIEPGFEL
PQALLDNETLMSGIDMTGDELKELIEAVYAWVDAA
KQGLATLLGRGGNVDDAVQTFEQFSAMMDTLNGTL
NTISARYVRAVEMAGKDEARLEKLIECKFDIPKWC
KSVPKLVGISGGLPKVEEEIKVMNAAFKDVRARMF
VRFEEIAAYVASKGAGMDVYDALEKRELEQIKKLK
SAVPERAHIQAYRAVLHRIGRAVQNCSEKTKQLFS
SKVIEMGVFKNPSHLNNFIFNQKGAIYRSPFDRSR
HAPYQLHADKLLKNDWLELLAEISATLMASESTEQ
MEDALRLERTRLQLQLSGLPDWEYPASLAKPDIEV
EIQTALKMQLAKDTVTSDVLQRAFNLYSSVLSGLT
FKLLRRSFSLKMRFSVADTTQLIYVPKVCDWAIPK
QYLQAEGEIGIAARVVTESSPAKMVTEVEMKEPKA
LGHFMQQAPHDWYFDASLGGTQVAGRIVEKGKEVG
KERKLVGYRMRGNSAYKTVLDKSLVGNTELSQCSM
IIEIPYTQTVDADFRAQVQAGLPKVSINLPVKETI
TASNKDEQMLFDRFVAIDLGERGLGYAVFDAKTLE
LQESGHRPIKAITNLLNRTHHYEQRPNQRQKFQAK
FNVNLSELRENTVGDVCHQINRICAYYNAFPVLEY
MVPDRLDKQLKSVYESVTNRYIWSSTDAHKSARVQ
FWLGGETWEHPYLKSAKDKKPLVLSPGRGASGKGT
SQTCSCCGRNPFDLIKDMKPRAKIAWDGKAKLENS
ELKLFERNLESKDDMLARRHRNERAGMEQPLTPGN
YTVDEIKALLRANLRRAPKNRRTKDTTVSEYHCVF
SDCGKTMHADENAAVNIGGKFIADIEK

### OspCas12c

MTKLRHRQKKLTHDWAGSKKREVLGSNGKLQNPLL
MPVKKGQVTEFRKAFSAYARATKGEMTDGRKNMFT
HSFEPFKTKPSLHQCELADKAYQSLHSYLPGSLAH
FLLSAHALGFRIFSKSGEATAFQASSKIEAYESKL
ASELACVDLSIQNLTISTLFNALTTSVRGKGEETS
ADPLIARFYTLLTGKPLSRDTQGPERDLAEVISRK
IASSFGTWKEMTANPLQSLQFFEEELHALDANVSL
SPAFDVLIKMNDLQGDLKNRTIVFDPDAPVFEYNA
EDPADIIIKLTARYAKEAVIKNQNVGNYVKNAITT
TNANGLGWLLNKGLSLLPVSTDDELLEFIGVERSH
PSCHALIELIAQLEAPELFEKNVFSDTRSEVQGMI
DSAVSNHIARLSSSRNSLSMDSEELERLIKSFQIH
TPHCSLFIGAQSLSQQLESLPEALQSGVNSADILL
GSTQYMLTNSLVEESIATYQRTLNRINYLSGVAGQ
INGAIKRKAIDGEKIHLPAAWSELISLPFIGQPVI
DVESDLAHLKNQYQTLSNEFDTLISALQKNFDLNF
NKALLNRTQHFEAMCRSTKKNALSKPEIVSYRDLL
ARLTSCLYRGSLVLRRAGIEVLKKHKIFESNSELR
EHVHERKHFVFVSPLDRKAKKLLRLTDSRPDLLHV
IDEILQHDNLENKDRESLWLVRSGYLLAGLPDQLS
SSFINLPIITQKGDRRLIDLIQYDQINRDAFVMLV
TSAFKSNLSGLQYRANKQSFVVTRTLSPYLGSKLV
YVPKDKDWLVPSQMFEGRFADILQSDYMVWKDAGR
LCVIDTAKHLSNIKKSVFSSEEVLAFLRELPHRTF
IQTEVRGLGVNVDGIAFNNGDIPSLKTFSNCVQVK
VSRTNTSLVQTLNRWFEGGKVSPPSIQFERAYYKK
DDQIHEDAAKRKIRFQMPATELVHASDDAGWTPSY
LLGIDPGEYGMGLSLVSINNGEVLDSGFIHINSLI
NFASKKSNHQTKVVPRQQYKSPYANYLEQSKDSAA
GDIAHILDRLIYKLNALPVFEALSGNSQSAADQVW
TKVLSFYTWGDNDAQNSIRKQHWFGASHWDIKGML
RQPPTEKKPKPYIAFPGSQVSSYGNSQRCSCCGRN
PIEQLREMAKDTSIKELKIRNSEIQLFDGTIKLFN
PDPSTVIERRRHNLGPSRIPVADRTFKNISPSSLE
FKELITIVSRSIRHSPEFIAKKRGIGSEYFCAYSD
CNSSLNSEANAAANVAQKFQKQLFFEL

[0336] In some embodiments, a napDNAbp refers to Cas12g, Cas12h, or Cas12i, which have been described in, for example, Yan et al., “Functionally Diverse Type V CRISPR-Cas Systems,” Science, 2019 Jan. 4; 363: 88-91; the entire contents of each is hereby incorporated by reference. By aggregating more than 10 terabytes of sequence data, new classifications of Type V Cas proteins were identified that showed weak similarity to previously characterized Class V protein, including Cas12g, Cas12h, and Cas12i. In some embodiments, the Cas12 protein is a Cas12g or a variant of Cas12g. In some embodiments, the Cas12 protein is a Cas12h or a variant of Cas12h. In some embodiments, the Cas12 protein is a Cas12i or a variant of Cas12i. It should be appreciated that other RNA-guided DNA binding proteins may be used as a napDNAbp, and are within the scope of this disclosure. In some embodiments, the napDNAbp comprises an amino acid sequence that is at least 85%, at least 90%, at least 91%, at least 92%, at least 93%, at least 94%, at least 95%, at least 96%, at least 97%, at least 98%, at least 99%, or at least 99.5% identical to a naturally-occurring Cas12g, Cas12h, or Cas12i protein. In some embodiments, the napDNAbp is a naturally-occurring Cas12g, Cas12h, or Cas12i protein. In some embodiments, the napDNAbp comprises an amino acid sequence that is at least 85%, at least 90%, at least 91%, at least 92%, at least 93%, at least 94%, at least 95%, at least 96%, at least 97%, at least 98%, at least 99%, or at ease 99.5% identical to any Cas12g, Cas12h, or Cas12i protein described herein. It should be appreciated that Cas12g, Cas12h, or Cas12i from other bacterial species may also be used in accordance with the present disclosure. In some embodiments, the Cas12i is a Cas12i1 or a Cas12i2.

### Cas12g1

MAQASSTPAVSPRPRPRYREERTLVRKLLPRPGQS
KQEERENVKKLRKAFLQFNADVSGVCQWAIQFRPR
YGKPAEPTETFWKFFLEPETSLPPNDSRSPEFRRL
QAFEAAAGINGAAALDDPAFTNELRDSILAVASRP
KTKEAQRLFSRLKDYQPAHRMILAKVAAEWIESRY
RRAHQNWERNYEEWKKEKQEWEQNHPELTPEIREA
FNQIFQQLEVKEKRVRICPAARLLQNKDNCQYAGK
NKHSVLCNQFNEFKKNHLQGKAIKFFYKDAEKYLR
CGLQSLKPNVQGPFREDWNKYLRYMNLKEETLRGK
NGGRLPHCKNLGQECEFNPHTALCKQYQQQLSSRP
DLVQHDELYRKWRREYWREPRKPVFRYPSVKRHSI
AKIFGENYFQADFKNSVVGLRLDSMPAGQYLEFAF
APWPRNYRPQPGETEISSVHLHFVGTRPRIGFRFR
VPHKRSRFDCTQEELDELRSRTFPRKAQDQKFLEA
ARKRLLETFPGNAEQELRLLAVDLGTDSARAAFFI
GKTFQQAFPLKIVKIEKLYEQWPNQKQAGDRRDAS
SKQPRPGLSRDHVGRHLQKMRAQASEIAQKRQELT
GTPAPETTTDQAAKKATLQPFDLRGLTVHTARMIR
DWARLNARQIIQLAEENQVDLIVLESLRGFRPPGY
ENLDQEKKRRVAFFAHGRIRRKVTEKAVERGMRVV
TVPYLASSKVCAECRKKQKDNKQWEKNKKRGLFKC
EGCGSQAQVDENAARVLGRVFWGEIELPTAIP

### Cas12h1

MKVHEIPRSQLLKIKQYEGSEVEWYRDLQEDRKKF
ASLLFRWAAFGYAAREDDGATYISPSQALLERRLL
LGDAEDVAIKFLDVLFKGGAPSSSCYSLFYEDFAL
RDKAKYSGAKREFIEGLATMPLDKIIERIRQDEQL
SKIPAEEWLILGAEYSPEEIWEQVAPRIVNVDRSL
GKQLRERLGIKCRRPHDAGYCKILMEVVARQLRSH
NETYHEYLNQTHEMKTKVANNLTNEFDLVCEFAEV
LEEKNYGLGWYVLWQGVKQALKEQKKPTKIQIAVD
QLRQPKFAGLLTAKWRALKGAYDTWKLKKRLEKRK
AFPYMPNWDNDYQIPVGLTGLGVFTLEVKRTEVVV
DLKEHGKLFCSHSHYFGDLTAEKHPSRYHLKFRHK
LKLRKRDSRVEPTIGPWIEAALREITIQKKPNGVF
YLGLPYALSHGIDNFQIAKRFFSAAKPDKEVINGL
PSEMVVGAADLNLSNIVAPVKARIGKGLEGPLHAL
DYGYGELIDGPKILTPDGPRCGELISLKRDIVEIK
SAIKEFKACQREGLTMSEETTTWLSEVESPSDSPR
CMIQSRIADTSRRLNSFKYQMNKEGYQDLAEALRL
LDAMDSYNSLLESYQRMHLSPGEQSPKEAKFDTKR
ASFRDLLRRRVAHTIVEYFDDCDIVFFEDLDGPSD
SDSRNNALVKLLSPRTLLLYIRQALEKRGIGMVEV
AKDGTSQNNPISGHVGWRNKQNKSEIYFYEDKELL
VMDADEVGAMNILCRGLNHSVCPYSFVTKAPEKKN
DEKKEGDYGKRVKRFLKDRYGSSNVRFLVASMGFV
TVTTKRPKDALVGKRLYYHGGELVTHDLHNRMKDE
IKYLVEKEVLARRVSLSDSTIKSYKSFAHV

### Cas12i1

MSNKEKNASETRKAYTTKMIPRSHDRMKLLGNEMD
YLMDGTPIFFELWNQFGGGIDRDIISGTANKDKIS
DDLLLAVNWFKVMPINSKPQGVSPSNLANLFQQYS
GSEPDIQAQEYFASNFDTEKHQWKDMRVEYERLLA
ELQLSRSDMHHDLKLMYKEKCIGLSLSTAHYITSV
MFGTGAKNNRQTKHQFYSKVIQLLEESTQINSVEQ
LASIILKAGDCDSYRKLRIRCSRKGATPSILKIVQ
DYELGTNHDDEVNVPSLIANLKEKLGRFEYECEWK
CMEKIKAFLASKVGPYYLGSYSAMLENALSPIKGM
TTKNCKFVLKQIDAKNDIKYENEPFGKIVEGFFDS
PYFESDTNVKWVLHPHHIGESNIKTLWEDLNAIHS
KYEEDIASLSEDKKEKRIKVYQGDVCQTINTYCEE
VGKEAKTPLVQLLRYLYSRKDDIAVDKIIDGITFL
SKKHKVEKQKINPVIQKYPSFNFGNNSKLLGKIIS
PKDKLKHNLKCNRNQVDNYIWIEIKVLNTKTMRWE
KHHYALSSTRFLEEVYYPATSENPPDALAARFRTK
TNGYEGKPALSAEQIEQIRSAPVGLRKVKKROMRL
EAARQQNLLPRYTWGKDFNINICKRGNNFEVTLAT
KVKKKKEKNYKVVLGYDANIVRKNTYAAIEAHANG
DGVIDYNDLPVKPIESGFVTVESQVRDKSYDQLSY
NGVKLLYCKPHVESRRSFLEKYRNGTMKDNRGNNI
QIDFMKDFEAIADDETSLYYFNMKYCKLLQSSIRN
HSSQAKEYREEIFELLRDGKLSVLKLSSLSNLSFV
MFKVAKSLIGTYFGHLLKKPKNSKSDVKAPPITDE
DKQKADPEMFALRLALEEKRLNKVKSKKEVIANKI
VAKALELRDKYGPVLIKGENISDTTKKGKKSSTNS
FLMDWLARGVANKVKEMVMMHQGLEFVEVNPNFTS
HQDPFVHKNPENTFRARYSRCTPSELTEKNRKEIL
SFLSDKPSKRPTNAYYNEGAMAFLATYGLKKNDVL
GVSLEKFKQIMANILHQRSEDQLLFPSRGGMFYLA
TYKLDADATSVNWNGKQFWVCNADLVAAYNVGLVD
IQKDFKKK

### Cas12i2

MSSAIKSYKSVLRPNERKNQLLKSTIQCLEDGSAF
FEKMLQGLFGGITPEIVRFSTEQEKQQQDIALWCA
VNWFRPVSQDSLTHTIASDNLVEKFEEYYGGTASD
AIKQYFSASIGESYYWNDCRQQYYDLCRELGVEVS
DLTHDLEILCREKCLAVATESNQNNSIISVLFGTG
EKEDRSVKLRITKKILEAISNLKEIPKNVAPIQEI
ILNVAKATKETFRQVYAGNLGAPSTLEKFIAKDGQ
KEFDLKKLQTDLKKVIRGKSKERDWCCQEELRSYV
EQNTIQYDLWAWGEMFNKAHTALKIKSTRNYNFAK
QRLEQFKEIQSLNNLLVVKKLNDFFDSEFFSGEET
YTICVHHLGGKDLSKLYKAWEDDPADPENAIVVLC
DDLKNNFKKEPIRNILRYIFTIRQECSAQDILAAA
KYNQQLDRYKSQKANPSVLGNQGFTWTNAVILPEK
AQRNDRPNSLDLRIWLYLKLRHPDGRWKKHHIPFY
DTRFFQEIYAAGNSPVDTCQFRTPRFGYHLPKLTD
QTAIRVNKKHVKAAKTEARIRLAIQQGTLPVSNLK
ITEISATINSKGQVRIPVKFDVGRQKGTLQIGDRF
CGYDQNQTASHAYSLWEVVKEGQYHKELGCFVRFI
SSGDIVSITENRGNQFDQLSYEGLAYPQYADWRKK
ASKFVSLWQITKKNKKKEIVTVEAKEKFDAICKYQ
PRLYKFNKEYAYLLRDIVRGKSLVELQQIRQEIFR
FIEQDCGVTRLGSLSLSTLETVKAVKGIIYSYFST
ALNASKNNPISDEQRKEFDPELFALLEKLELIRTR
KKKQKVERIANSLIQTCLENNIKFIRGEGDLSTTN
NATKKKANSRSMDWLARGVFNKIRQLAPMHNITLF
GCGSLYTSHQDPLVHRNPDKAMKCRWAAIPVKDIG
DWVLRKLSQNLRAKNIGTGEYYHQGVKEFLSHYEL
QDLEEELLKWRSDRKSNIPCWVLQNRLAEKLGNKE
AVVYIPVRGGRIYFATHKVATGAVSIVFDQKQVWV
CNADHVAAANIALTVKGIGEQSSDEENPDGSRIKL
QLTS

[0341] Representative nucleic acid and protein sequences of the base editors follow:

### BhCas12b GGSGGS-ABE8-Xten20 at P153

GCCACC [symbol] [symbol] [symbol] GCCAC
CAGATCCTTCATCCTGAAGATCGAGCCCAACGAGGAAGTGAAGAAAGGCCTCTGGAAAACCC
ACGAGGTGCTGAACCACGGAATCGCCTACTACATGAATATCCTGAAGCTGATCCGGCAAGAG
GCCATCTACGAGCACCACGAGCAGGACCCCAAGAATCCCAAGAAGGTGTCCAAGGCCGAGAT
CCAGGCCGAGCTGTGGGATTTCGTGCTGAAGATGCAGAAGTGCAACAGCTTCACACACGAGG
TGGACAAGGACGAGGTGTTCAACATCCTGAGAGAGCTGTACGAGGAACTGGTGCCCAGCAGC
GTGGAAAAGAAGGGCGAAGCCAACCAGCTGAGCAACAAGTTTCTGTACCCTCTGGTGGACCC
CAACAGCCAGTCTGGAAAGGGAACAGCCAGCAGCGGCAGAAAGCCCAGATGGTACAACCTGA

[chemical structure]

[chemical structure]

[chemical structure]

[chemical structure]

[chemical structure]

[chemical structure]

[chemical structure]

[chemical structure]

[chemical structure]

GCACAAGCGAGAGCGCCACCCCTGAGAGCTCTGGCTCCTGGGAAGAAGAGAAGAAGAAGTGG
GAAGAAGATAAGAAAAAGGACCCGCTGGCCAAGATCCTGGGCAAGCTGGCTGAGTACGGACT
GATCCCTCTGTTCATCCCCTACACCGACAGCAACGAGCCCATCGTGAAAGAAATCAAGTGGA
TGGAAAAGTCCCGGAACCAGAGCGTGCGGCGGCTGGATAAGGACATGTTCATTCAGGCCCTG
GAACGGTTCCTGAGCTGGGAGAGCTGGAACCTGAAAGTGAAAGAGGAATACGAGAAGGTCGA
GAAAGAGTACAAGACCCTGGAAGAGAGGATCAAAGAGGACATCCAGGCTCTGAAGGCTCTGG
AACAGTATGAGAAAGAGCGGCAAGAACAGCTGCTGCGGGACACCCTGAACACCAACGAGTAC
CGGCTGAGCAAGAGAGGCCTTAGAGGCTGGCGGGAAATCATCCAGAAATGGCTGAAAATGGA
CGAGAACGAGCCCTCCGAGAAGTACCTGGAAGTGTTCAAGGACTACCAGCGGAAGCACCCTA
GAGAGGCCGGCGATTACAGCGTGTACGAGTTCCTGTCCAAGAAAGAGAACCACTTCATCTGG
CGGAATCACCCTGAGTACCCCTACCTGTACGCCACCTTCTGCGAGATCGACAAGAAAAAGAA
GGACGCCAAGCAGCAGGCCACCTTCACACTGGCCGATCCTATCAATCACCCTCTGTGGGTCC
GATTCGAGGAAAGAAGCGGCAGCAACCTGAACAAGTACAGAATCCTGACCGAGCAGCTGCAC
ACCGAGAAGCTGAAGAAAAAGCTGACAGTGCAGCTGGACCGGCTGATCTACCCTACAGAATC
TGGCGGCTGGGAAGAGAAGGGCAAAGTGGACATTGTGCTGCTGCCCAGCCGGCAGTTCTACA
ACCAGATCTTCCTGGACATCGAGGAAAAGGGCAAGCACGCCTTCACCTACAAGGATGAGAGC
ATCAAGTTCCCTCTGAAGGGCACACTCGGCGGAGCCAGAGTGCAGTTCGACAGAGATCACCT
GAGAAGATACCCTCACAAGGTGGAAAGCGGCAACGTGGGCAGAATCTACTTCAACATGACCG
TGAACATCGAGCCTACAGAGTCCCCAGTGTCCAAGTCTCTGAAGATCCACCGGGACGACTTC
CCCAAGGTGGTCAACTTCAAGCCCAAAGAACTGACCGAGTGGATCAAGGACAGCAAGGGCAA
GAAACTGAAGTCCGGCATCGAGTCCCTGGAAATCGGCCTGAGAGTGATGAGCATCGACCTGG
GACAGAGACAGGCCGCTGCCGCCTCTATTTTCGAGGTGGTGGATCAGAAGCCCGACATCGAA
GGCAAGCTGTTTTTCCCAATCAAGGGCACCGAGCTGTATGCCGTGCACAGAGCCAGCTTCAA
CATCAAGCTGCCCGGCGAGACACTGGTCAAGAGCAGAGAAGTGCTGCGGAAGGCCAGAGAGG
ACAATCTGAAACTGATGAACCAGAAGCTCAACTTCCTGCGGAACGTGCTGCACTTCCAGCAG
TTCGAGGACATCACCGAGAGAGAGAAGCGGGTCACCAAGTGGATCAGCAGACAAGAGAACAG
CGACGTGCCCCTGGTGTACCAGGATGAGCTGATCCAGATCCGCGAGCTGATGTACAAGCCTT
ACAAGGACTGGGTCGCCTTCCTGAAGCAGCTCCACAAGAGACTGGAAGTCGAGATCGGCAAA
GAAGTGAAGCACTGGCGGAAGTCCCTGAGCGACGGAAGAAAGGGCCTGTACGGCATCTCCCT
GAAGAACATCGACGAGATCGATCGGACCCGGAAGTTCCTGCTGAGATGGTCCCTGAGGCCTA
CCGAACCTGGCGAAGTGCGTAGACTGGAACCCGGCCAGAGATTCGCCATCGACCAGCTGAAT
CACCTGAACGCCCTGAAAGAAGATCGGCTGAAGAAGATGGCCAACACCATCATCATGCACGC
CCTGGGCTACTGCTACGACGTGCGGAAGAAGAAATGGCAGGCTAAGAACCCCGCCTGCCAGA
TCATCCTGTTCGAGGATCTGAGCAACTACAACCCCTACGAGGAAAGGTCCCGCTTCGAGAAC
AGCAAGCTCATGAAGTGGTCCAGACGCGAGATCCCCAGACAGGTTGCACTGCAGGGCGAGAT
CTATGGCCTGCAAGTGGGAGAAGTGGGCGCTCAGTTCAGCAGCAGATTCCACGCCAAGACAG
GCAGCCCTGGCATCAGATGTAGCGTCGTGACCAAAGAGAAGCTGCAGGACAATCGGTTCTTC
AAGAATCTGCAGAGAGAGGGCAGACTGACCCTGGACAAAATCGCCGTGCTGAAAGAGGGCGA
TCTGTACCCAGACAAAGGCGGCGAGAAGTTCATCAGCCTGAGCAAGGATCGGAAGTGCGTGA
CCACACACGCCGACATCAACGCCGCTCAGAACCTGCAGAAGCGGTTCTGGACAAGAACCCAC
GGCTTCTACAAGGTGTACTGCAAGGCCTACCAGGTGGACGGCCAGACCGTGTACATCCCT
GAGAGCAAGGACCAGAAGCAGAAGATCATCGAAGAGTTCGGCGAGGGCTACTTCATTCTGAA
GGACGGGGTGTACGAATGGGTCAACGCCGGCAAGCTGAAAATCAAGAAGGGCAGCTCCAAGC
AGAGCAGCAGCGAGCTGGTGGATAGCGACATCCTGAAAGACAGCTTCGACCTGGCCTCCGAG
CTGAAAGGCGAAAAGCTGATGCTGTACAGGGACCCCAGCGGCAATGTGTTCCCCAGCGACAA
ATGGATGGCCGCTGGCGTGTTCTTCGGAAAGCTGGAACGCATCCTGATCAGCAAGCTGACCA
ACCAGTACTCCATCAGCACCATCGAGGACGACAGCAGCAAGCAGTCTATGAAAAGGCCGGCG
GCCACGAAAAAGGCCGGCCAGGCAAAAAAGAAAAAG [symbol] TACCCATACGATGTTCCAGA
TTACGCTTATCCCTACGACGTGCCTGATTATGCATACCCATATGATGTCCCCGACTATGCCT
AA
MAPKKKRKVGIHGVPAAATRSFILKIEPNEEVKKGLWKTHEVLNHGIAYYMNILKLIRQEAI
YEHHEQDPKNPKKVSKAEIQAELWDFVLKMQKCNSFTHEVDKDEVFNILRELYEELVPSSVE
KKGEANQLSNKFLYPLVDPNSQSGKGTASSGRKPRWYNLKIAGDPGGSGGSSEVEFSHEYWM
RHALTLAKRARDEREVPVGAVLVLNNRVIGEGWNRAIGLHDPTAHAEIMALRQGGLVMQNYR
LYDATLYVTFEPCVMCAGAMIHSRIGRVVFGVRNAKTGAAGSLMDVLHHPGMNHRVEITEGI
LADECAALLCRFFRMPRRVFNAQKKAQSSTDGSSGSETPGTSESATPESSGSWEEEKKKWEE
DKKKDPLAKILGKLAEYGLIPLFIPYTDSNEPIVKEIKWMEKSRNQSVRRLDKDMFIQALER
FLSWESWNLKVKEEYEKVEKEYKTLEERIKEDIQALKALEQYEKERQEQLLRDTLNTNEYRL
SKRGLRGWREIIQKWLKMDENEPSEKYLEVFKDYQRKHPREAGDYSVYEFLSKKENHFIWRN
HPEYPYLYATFCEIDKKKKDAKQQATFTLADPINHPLWVRFEERSGSNLNKYRILTEQLHTE
KLKKKLTVQLDRLIYPTESGGWEEKGKVDIVLLPSRQFYNQIFLDIEEKGKHAFTYKDESIK
FPLKGTLGGARVQFDRDHLRRYPHKVESGNVGRIYFNMTVNIEPTESPVSKSLKIHRDDFPK
VVNFKPKELTEWIKDSKGKKLKSGIESLEIGLRVMSIDLGQRQAAAASIFEVVDQKPDIEGK
LFFPIKGTELYAVHRASFNIKLPGETLVKSREVLRKAREDNLKLMNQKLNFLRNVLHFQQFE
DITEREKRVTKWISRQENSDVPLVYQDELIQIRELMYKPYKDWVAFLKQLHKRLEVEIGKEV
KHWRKSLSDGRKGLYGISLKNIDEIDRTRKFLLRWSLRPTEPGEVRRLEPGQRFAIDQLNHL
NALKEDRLKKMANTIIMHALGYCYDVRKKKWQAKNPACQIILFEDLSNYNPYEERSRFENSK
LMKWSRREIPRQVALQGEIYGLQVGEVGAQFSSRFHAKTGSPGIRCSVVTKEKLQDNRFFKN
LQREGRLTLDKIAVLKEGDLYPDKGGEKFISLSKDRKCVTTHADINAAQNLQKRFWTRTHGF
YKVYCKAYQVDGQTVYIPESKDQKQKIIEEFGEGYFILKDGVYEWVNAGKLKIKKGSSKQSS
SELVDSDILKDSFDLASELKGEKLMLYRDPSGNVFPSDKWMAAGVFFGKLERILISKLTNQY
SISTIEDDSSKQSMKRPAATKKAGOAKKKKGSYPYDVPDYAYPYDVPDYAYPYDVPDYA

### BhCas12b GGSGGS-ABE8-Xten20 at 1(255

GCCACC [symbol] [symbol] [symbol] GCCAC
CAGATCCTTCATCCTGAAGATCGAGCCCAACGAGGAAGTGAAGAAAGGCCTCTGGAAAACCC
ACGAGGTGCTGAACCACGGAATCGCCTACTACATGAATATCCTGAAGCTGATCCGGCAAGAG
GCCATCTACGAGCACCACGAGCAGGACCCCAAGAATCCCAAGAAGGTGTCCAAGGCCGAGAT
CCAGGCCGAGCTGTGGGATTTCGTGCTGAAGATGCAGAAGTGCAACAGCTTCACACACGAGG
TGGACAAGGACGAGGTGTTCAACATCCTGAGAGAGCTGTACGAGGAACTGGTGCCCAGCAGC
GTGGAAAAGAAGGGCGAAGCCAACCAGCTGAGCAACAAGTTTCTGTACCCTCTGGTGGACCC
CAACAGCCAGTCTGGAAAGGGAACAGCCAGCAGCGGCAGAAAGCCCAGATGGTACAACCTGA
AGATTGCCGGCGATCCCTCCTGGGAAGAAGAGAAGAAGAAGTGGGAAGAAGATAAGAAAAAG
GACCCGCTGGCCAAGATCCTGGGCAAGCTGGCTGAGTACGGACTGATCCCTCTGTTCATCCC
CTACACCGACAGCAACGAGCCCATCGTGAAAGAAATCAAGTGGATGGAAAAGTCCCGGAACC
AGAGCGTGCGGCGGCTGGATAAGGACATGTTCATTCAGGCCCTGGAACGGTTCCTGAGCTGG
GAGAGCTGGAACCTGAAAGTGAAAGAGGAATACGAGAAGGTCGAGAAAGAGTACAAGACCCT

[chemical structure]

[chemical structure]

[chemical structure]

[chemical structure]

[chemical structure]

[chemical structure]

[chemical structure]

[chemical structure]

[chemical structure]

CACAAGCGAGAGCGCCACCCCTGAGAGCTCTGGCGAGGACATCCAGGCTCTGAAGGCTCTGG
AACAGTATGAGAAAGAGCGGCAAGAACAGCTGCTGCGGGACACCCTGAACACCAACGAGTAC
CGGCTGAGCAAGAGAGGCCTTAGAGGCTGGCGGGAAATCATCCAGAAATGGCTGAAAATGGA
CGAGAACGAGCCCTCCGAGAAGTACCTGGAAGTGTTCAAGGACTACCAGCGGAAGCACCCTA
GAGAGGCCGGCGATTACAGCGTGTACGAGTTCCTGTCCAAGAAAGAGAACCACTTCATCTGG
CGGAATCACCCTGAGTACCCCTACCTGTACGCCACCTTCTGCGAGATCGACAAGAAAAAGAA
GGACGCCAAGCAGCAGGCCACCTTCACACTGGCCGATCCTATCAATCACCCTCTGTGGGTCC
GATTCGAGGAAAGAAGCGGCAGCAACCTGAACAAGTACAGAATCCTGACCGAGCAGCTGCAC
ACCGAGAAGCTGAAGAAAAAGCTGACAGTGCAGCTGGACCGGCTGATCTACCCTACAGAATC
TGGCGGCTGGGAAGAGAAGGGCAAAGTGGACATTGTGCTGCTGCCCAGCCGGCAGTTCTACA
ACCAGATCTTCCTGGACATCGAGGAAAAGGGCAAGCACGCCTTCACCTACAAGGATGAGAGC
ATCAAGTTCCCTCTGAAGGGCACACTCGGCGGAGCCAGAGTGCAGTTCGACAGAGATCACCT
GAGAAGATACCCTCACAAGGTGGAAAGCGGCAACGTGGGCAGAATCTACTTCAACATGACCG
TGAACATCGAGCCTACAGAGTCCCCAGTGTCCAAGTCTCTGAAGATCCACCGGGACGACTTC
CCCAAGGTGGTCAACTTCAAGCCCAAAGAACTGACCGAGTGGATCAAGGACAGCAAGGGCAA
GAAACTGAAGTCCGGCATCGAGTCCCTGGAAATCGGCCTGAGAGTGATGAGCATCGACCTGG
GACAGAGACAGGCCGCTGCCGCCTCTATTTTCGAGGTGGTGGATCAGAAGCCCGACATCGAA
GGCAAGCTGTTTTTCCCAATCAAGGGCACCGAGCTGTATGCCGTGCACAGAGCCAGCTTCAA
CATCAAGCTGCCCGGCGAGACACTGGTCAAGAGCAGAGAAGTGCTGCGGAAGGCCAGAGAGG
ACAATCTGAAACTGATGAACCAGAAGCTCAACTTCCTGCGGAACGTGCTGCACTTCCAGCAG
TTCGAGGACATCACCGAGAGAGAGAAGCGGGTCACCAAGTGGATCAGCAGACAAGAGAACAG
CGACGTGCCCCTGGTGTACCAGGATGAGCTGATCCAGATCCGCGAGCTGATGTACAAGCCTT
ACAAGGACTGGGTCGCCTTCCTGAAGCAGCTCCACAAGAGACTGGAAGTCGAGATCGGCAAA
GAAGTGAAGCACTGGCGGAAGTCCCTGAGCGACGGAAGAAAGGGCCTGTACGGCATCTCCCT
GAAGAACATCGACGAGATCGATCGGACCCGGAAGTTCCTGCTGAGATGGTCCCTGAGGCCTA
CCGAACCTGGCGAAGTGCGTAGACTGGAACCCGGCCAGAGATTCGCCATCGACCAGCTGAAT
CACCTGAACGCCCTGAAAGAAGATCGGCTGAAGAAGATGGCCAACACCATCATCATGCACGC
CCTGGGCTACTGCTACGACGTGCGGAAGAAGAAATGGCAGGCTAAGAACCCCGCCTGCCAGA
TCATCCTGTTCGAGGATCTGAGCAACTACAACCCCTACGAGGAAAGGTCCCGCTTCGAGAAC
AGCAAGCTCATGAAGTGGTCCAGACGCGAGATCCCCAGACAGGTTGCACTGCAGGGCGAGAT
CTATGGCCTGCAAGTGGGAGAAGTGGGCGCTCAGTTCAGCAGCAGATTCCACGCCAAGACAG
GCAGCCCTGGCATCAGATGTAGCGTCGTGACCAAAGAGAAGCTGCAGGACAATCGGTTCTTC
AAGAATCTGCAGAGAGAGGGCAGACTGACCCTGGACAAAATCGCCGTGCTGAAAGAGGGCGA
TCTGTACCCAGACAAAGGCGGCGAGAAGTTCATCAGCCTGAGCAAGGATCGGAAGTGCGTGA
CCACACACGCCGACATCAACGCCGCTCAGAACCTGCAGAAGCGGTTCTGGACAAGAACCCAC
GGCTTCTACAAGGTGTACTGCAAGGCCTACCAGGTGGACGGCCAGACCGTGTACATCCCTGA
GAGCAAGGACCAGAAGCAGAAGATCATCGAAGAGTTCGGCGAGGGCTACTTCATTCTGAAGG
ACGGGGTGTACGAATGGGTCAACGCCGGCAAGCTGAAAATCAAGAAGGGCAGCTCCAAGCAG
AGCAGCAGCGAGCTGGTGGATAGCGACATCCTGAAAGACAGCTTCGACCTGGCCTCCGAGCT
GAAAGGCGAAAAGCTGATGCTGTACAGGGACCCCAGCGGCAATGTGTTCCCCAGCGACAAAT
GGATGGCCGCTGGCGTGTTCTTCGGAAAGCTGGAACGCATCCTGATCAGCAAGCTGACCAAC
CAGTACTCCATCAGCACCATCGAGGACGACAGCAGCAAGCAGTCTATGAAAAGGCCGGCGGC
CACGAAAAAGGCCGGCCAGGCAAAAAAGAAAAAG [symbol] TACCCATACGATGTTCCAGATT
ACGCTTATCCCTACGACGTGCCTGATTATGCATACCCATATGATGTCCCCGACTATGCCTAA
MAPKKKRKVGIHGVPAAATRSFILKIEPNEEVKKGLWKTHEVLNHGIAYYMNILKLIRQEAI
YEHHEQDPKNPKKVSKAEIQAELWDFVLKMQKCNSFTHEVDKDEVFNILRELYEELVPSSVE
KKGEANQLSNKFLYPLVDPNSQSGKGTASSGRKPRWYNLKIAGDPSWEEEKKKWEEDKKKDP
LAKILGKLAEYGLIPLFIPYTDSNEPIVKEIKWMEKSRNQSVRRLDKDMFIQALERFLSWES
WNLKVKEEYEKVEKEYKTLEERIKGGSGGSSEVEFSHEYWMRHALTLAKRARDEREVPVGAV
LVLNNRVIGEGWNRAIGLHDPTAHAEIMALRQGGLVMQNYRLYDATLYVTFEPCVMCAGAMI
HSRIGRVVFGVRNAKTGAAGSLMDVLHHPGMNHRVEITEGILADECAALLCRFFRMPRRVFN
AQKKAQSSTDGSSGSETPGTSESATPESSGEDIQALKALEQYEKERQEQLLRDTLNTNEYRL
SKRGLRGWREIIQKWLKMDENEPSEKYLEVFKDYQRKHPREAGDYSVYEFLSKKENHFIWRN
HPEYPYLYATFCEIDKKKKDAKQQATFTLADPINHPLWVRFEERSGSNLNKYRILTEQLHTE
KLKKKLTVQLDRLIYPTESGGWEEKGKVDIVLLPSRQFYNQIFLDIEEKGKHAFTYKDESIK
FPLKGTLGGARVQFDRDHLRRYPHKVESGNVGRIYFNMTVNIEPTESPVSKSLKIHRDDFPK
VVNFKPKELTEWIKDSKGKKLKSGIESLEIGLRVMSIDLGQRQAAAASIFEVVDQKPDIEGK
LFFPIKGTELYAVHRASFNIKLPGETLVKSREVLRKAREDNLKLMNQKLNFLRNVLHFQQFE
DITEREKRVTKWISRQENSDVPLVYQDELIQIRELMYKPYKDWVAFLKQLHKRLEVEIGKEV
KHWRKSLSDGRKGLYGISLKNIDEIDRTRKFLLRWSLRPTEPGEVRRLEPGQRFAIDQLNHL
NALKEDRLKKMANTIIMHALGYCYDVRKKKWQAKNPACQIILFEDLSNYNPYEERSRFENSK
LMKWSRREIPRQVALQGEIYGLQVGEVGAQFSSRFHAKTGSPGIRCSVVTKEKLQDNRFFKN
LQREGRLTLDKIAVLKEGDLYPDKGGEKFISLSKDRKCVTTHADINAAQNLQKRFWTRTHGF
YKVYCKAYQVDGQTVYIPESKDQKQKIIEEFGEGYFILKDGVYEWVNAGKLKIKKGSSKQSS
SELVDSDILKDSFDLASELKGEKLMLYRDPSGNVFPSDKWMAAGVFFGKLERILISKLTNQY
SISTIEDDSSKQSMKRPAATKKAGQAKKKKGSYPYDVPDYAYPYDVPDYAYPYDVPDYA

### BhCas12b GGSGGS-ABE8-Xten20 at D306

GCCACC [symbol] [symbol] [symbol] GCCAC
CAGATCCTTCATCCTGAAGATCGAGCCCAACGAGGAAGTGAAGAAAGGCCTCTGGAAAACCC
ACGAGGTGCTGAACCACGGAATCGCCTACTACATGAATATCCTGAAGCTGATCCGGCAAGAG
GCCATCTACGAGCACCACGAGCAGGACCCCAAGAATCCCAAGAAGGTGTCCAAGGCCGAGAT
CCAGGCCGAGCTGTGGGATTTCGTGCTGAAGATGCAGAAGTGCAACAGCTTCACACACGAGG
TGGACAAGGACGAGGTGTTCAACATCCTGAGAGAGCTGTACGAGGAACTGGTGCCCAGCAGC
GTGGAAAAGAAGGGCGAAGCCAACCAGCTGAGCAACAAGTTTCTGTACCCTCTGGTGGACCC
CAACAGCCAGTCTGGAAAGGGAACAGCCAGCAGCGGCAGAAAGCCCAGATGGTACAACCTGA
AGATTGCCGGCGATCCCTCCTGGGAAGAAGAGAAGAAGAAGTGGGAAGAAGATAAGAAAAAG
GACCCGCTGGCCAAGATCCTGGGCAAGCTGGCTGAGTACGGACTGATCCCTCTGTTCATCCC
CTACACCGACAGCAACGAGCCCATCGTGAAAGAAATCAAGTGGATGGAAAAGTCCCGGAACC
AGAGCGTGCGGCGGCTGGATAAGGACATGTTCATTCAGGCCCTGGAACGGTTCCTGAGCTGG
GAGAGCTGGAACCTGAAAGTGAAAGAGGAATACGAGAAGGTCGAGAAAGAGTACAAGACCCT
GGAAGAGAGGATCAAAGAGGACATCCAGGCTCTGAAGGCTCTGGAACAGTATGAGAAAGAGC
GGCAAGAACAGCTGCTGCGGGACACCCTGAACACCAACGAGTACCGGCTGAGCAAGAGAGGC
CTTAGAGGCTGGCGGGAAATCATCCAGAAATGGCTGAAAATGGACggaggctctggaggaag

[chemical structure]

[chemical structure]

[chemical structure]

[chemical structure]

[chemical structure]

[chemical structure]

[chemical structure]

[chemical structure]

[chemical structure]

[chemical structure]

CGAGAACGAGCCCTCCGAGAAGTACCTGGAAGTGTTCAAGGACTACCAGCGGAAGCACCCTA
GAGAGGCCGGCGATTACAGCGTGTACGAGTTCCTGTCCAAGAAAGAGAACCACTTCATCTGG
CGGAATCACCCTGAGTACCCCTACCTGTACGCCACCTTCTGCGAGATCGACAAGAAAAAGAA
GGACGCCAAGCAGCAGGCCACCTTCACACTGGCCGATCCTATCAATCACCCTCTGTGGGTCC
GATTCGAGGAAAGAAGCGGCAGCAACCTGAACAAGTACAGAATCCTGACCGAGCAGCTGCAC
ACCGAGAAGCTGAAGAAAAAGCTGACAGTGCAGCTGGACCGGCTGATCTACCCTACAGAATC
TGGCGGCTGGGAAGAGAAGGGCAAAGTGGACATTGTGCTGCTGCCCAGCCGGCAGTTCTACA
ACCAGATCTTCCTGGACATCGAGGAAAAGGGCAAGCACGCCTTCACCTACAAGGATGAGAGC
ATCAAGTTCCCTCTGAAGGGCACACTCGGCGGAGCCAGAGTGCAGTTCGACAGAGATCACCT
GAGAAGATACCCTCACAAGGTGGAAAGCGGCAACGTGGGCAGAATCTACTTCAACATGACCG
TGAACATCGAGCCTACAGAGTCCCCAGTGTCCAAGTCTCTGAAGATCCACCGGGACGACTTC
CCCAAGGTGGTCAACTTCAAGCCCAAAGAACTGACCGAGTGGATCAAGGACAGCAAGGGCAA
GAAACTGAAGTCCGGCATCGAGTCCCTGGAAATCGGCCTGAGAGTGATGAGCATCGACCTGG
GACAGAGACAGGCCGCTGCCGCCTCTATTTTCGAGGTGGTGGATCAGAAGCCCGACATCGAA
GGCAAGCTGTTTTTCCCAATCAAGGGCACCGAGCTGTATGCCGTGCACAGAGCCAGCTTCAA
CATCAAGCTGCCCGGCGAGACACTGGTCAAGAGCAGAGAAGTGCTGCGGAAGGCCAGAGAGG
ACAATCTGAAACTGATGAACCAGAAGCTCAACTTCCTGCGGAACGTGCTGCACTTCCAGCAG
TTCGAGGACATCACCGAGAGAGAGAAGCGGGTCACCAAGTGGATCAGCAGACAAGAGAACAG
CGACGTGCCCCTGGTGTACCAGGATGAGCTGATCCAGATCCGCGAGCTGATGTACAAGCCTT
ACAAGGACTGGGTCGCCTTCCTGAAGCAGCTCCACAAGAGACTGGAAGTCGAGATCGGCAAA
GAAGTGAAGCACTGGCGGAAGTCCCTGAGCGACGGAAGAAAGGGCCTGTACGGCATCTCCCT
GAAGAACATCGACGAGATCGATCGGACCCGGAAGTTCCTGCTGAGATGGTCCCTGAGGCCTA
CCGAACCTGGCGAAGTGCGTAGACTGGAACCCGGCCAGAGATTCGCCATCGACCAGCTGAAT
CACCTGAACGCCCTGAAAGAAGATCGGCTGAAGAAGATGGCCAACACCATCATCATGCACGC
CCTGGGCTACTGCTACGACGTGCGGAAGAAGAAATGGCAGGCTAAGAACCCCGCCTGCCAGA
TCATCCTGTTCGAGGATCTGAGCAACTACAACCCCTACGAGGAAAGGTCCCGCTTCGAGAAC
AGCAAGCTCATGAAGTGGTCCAGACGCGAGATCCCCAGACAGGTTGCACTGCAGGGCGAGAT
CTATGGCCTGCAAGTGGGAGAAGTGGGCGCTCAGTTCAGCAGCAGATTCCACGCCAAGACAG
GCAGCCCTGGCATCAGATGTAGCGTCGTGACCAAAGAGAAGCTGCAGGACAATCGGTTCTTC
AAGAATCTGCAGAGAGAGGGCAGACTGACCCTGGACAAAATCGCCGTGCTGAAAGAGGGCGA
TCTGTACCCAGACAAAGGCGGCGAGAAGTTCATCAGCCTGAGCAAGGATCGGAAGTGCGTGA
CCACACACGCCGACATCAACGCCGCTCAGAACCTGCAGAAGCGGTTCTGGACAAGAACCCAC
GGCTTCTACAAGGTGTACTGCAAGGCCTACCAGGTGGACGGCCAGACCGTGTACATCCCTGA
GAGCAAGGACCAGAAGCAGAAGATCATCGAAGAGTTCGGCGAGGGCTACTTCATTCTGAAGG
ACGGGGTGTACGAATGGGTCAACGCCGGCAAGCTGAAAATCAAGAAGGGCAGCTCCAAGCAG
AGCAGCAGCGAGCTGGTGGATAGCGACATCCTGAAAGACAGCTTCGACCTGGCCTCCGAGCT
GAAAGGCGAAAAGCTGATGCTGTACAGGGACCCCAGCGGCAATGTGTTCCCCAGCGACAAAT
GGATGGCCGCTGGCGTGTTCTTCGGAAAGCTGGAACGCATCCTGATCAGCAAGCTGACCAAC
CAGTACTCCATCAGCACCATCGAGGACGACAGCAGCAAGCAGTCTATGAAAAGGCCGGCGGC
CACGAAAAAGGCCGGCCAGGCAAAAAAGAAAAAG [symbol] TACCCATACGATGTTCCAGATT
ACGCTTATCCCTACGACGTGCCTGATTATGCATACCCATATGATGTCCCCGACTATGCCTAA
MAPKKKRKVGIHGVPAAATRSFILKIEPNEEVKKGLWKTHEVLNHGIAYYMNILKLIRQEAI
YEHHEQDPKNPKKVSKAEIQAELWDFVLKMQKCNSFTHEVDKDEVFNILRELYEELVPSSVE
KKGEANQLSNKFLYPLVDPNSQSGKGTASSGRKPRWYNLKIAGDPSWEEEKKKWEEDKKKDP
LAKILGKLAEYGLIPLFIPYTDSNEPIVKEIKWMEKSRNQSVRRLDKDMFIQALERFLSWES
WNLKVKEEYEKVEKEYKTLEERIKEDIQALKALEQYEKERQEQLLRDTLNTNEYRLSKRGLR
GWREIIQKWLKMDGGSGGSSEVEFSHEYWMRHALTLAKRARDEREVPVGAVLVLNNRVIGEG
WNRAIGLHDPTAHAEIMALRQGGLVMQNYRLYDATLYVTFEPCVMCAGAMIHSRIGRVVFGV
RNAKTGAAGSLMDVLHHPGMNHRVEITEGILADECAALLCRFFRMPRRVFNAQKKAQSSTDG
SSGSETPGTSESATPESSGENEPSEKYLEVFKDYQRKHPREAGDYSVYEFLSKKENHFIWRN
HPEYPYLYATFCEIDKKKKDAKQQATFTLADPINHPLWVRFEERSGSNLNKYRILTEQLHTE
KLKKKLTVQLDRLIYPTESGGWEEKGKVDIVLLPSRQFYNQIFLDIEEKGKHAFTYKDESIK
FPLKGTLGGARVQFDRDHLRRYPHKVESGNVGRIYFNMTVNIEPTESPVSKSLKIHRDDFPK
VVNFKPKELTEWIKDSKGKKLKSGIESLEIGLRVMSIDLGQRQAAAASIFEVVDQKPDIEGK
LFFPIKGTELYAVHRASFNIKLPGETLVKSREVLRKAREDNLKLMNQKLNFLRNVLHFQQFE
DITEREKRVTKWISRQENSDVPLVYQDELIQIRELMYKPYKDWVAFLKQLHKRLEVEIGKEV
KHWRKSLSDGRKGLYGISLKNIDEIDRTRKFLLRWSLRPTEPGEVRRLEPGQRFAIDQLNHL
NALKEDRLKKMANTIIMHALGYCYDVRKKKWQAKNPACQIILFEDLSNYNPYEERSRFENSK
LMKWSRREIPRQVALQGEIYGLQVGEVGAQFSSRFHAKTGSPGIRCSVVTKEKLQDNRFFKN
LQREGRLTLDKIAVLKEGDLYPDKGGEKFISLSKDRKCVTTHADINAAQNLQKRFWTRTHGF
YKVYCKAYQVDGQTVYIPESKDQKQKIIEEFGEGYFILKDGVYEWVNAGKLKIKKGSSKQSS
SELVDSDILKDSFDLASELKGEKLMLYRDPSGNVFPSDKWMAAGVFFGKLERILISKLTNQY
SISTIEDDSSKQSMKRPAATKKAGQAKKKKGSYPYDVPDYAYPYDVPDYAYPYDVPDYA

### BhCas12b GGSGGS-ABE8-Xten20 at D980

GCCACC [symbol] [symbol] [symbol] GCCAC
CAGATCCTTCATCCTGAAGATCGAGCCCAACGAGGAAGTGAAGAAAGGCCTCTGGAAAACCC
ACGAGGTGCTGAACCACGGAATCGCCTACTACATGAATATCCTGAAGCTGATCCGGCAAGAG
GCCATCTACGAGCACCACGAGCAGGACCCCAAGAATCCCAAGAAGGTGTCCAAGGCCGAGAT
CCAGGCCGAGCTGTGGGATTTCGTGCTGAAGATGCAGAAGTGCAACAGCTTCACACACGAGG
TGGACAAGGACGAGGTGTTCAACATCCTGAGAGAGCTGTACGAGGAACTGGTGCCCAGCAGC
GTGGAAAAGAAGGGCGAAGCCAACCAGCTGAGCAACAAGTTTCTGTACCCTCTGGTGGACCC
CAACAGCCAGTCTGGAAAGGGAACAGCCAGCAGCGGCAGAAAGCCCAGATGGTACAACCTGA
AGATTGCCGGCGATCCCTCCTGGGAAGAAGAGAAGAAGAAGTGGGAAGAAGATAAGAAAAAG
GACCCGCTGGCCAAGATCCTGGGCAAGCTGGCTGAGTACGGACTGATCCCTCTGTTCATCCC
CTACACCGACAGCAACGAGCCCATCGTGAAAGAAATCAAGTGGATGGAAAAGTCCCGGAACC
AGAGCGTGCGGCGGCTGGATAAGGACATGTTCATTCAGGCCCTGGAACGGTTCCTGAGCTGG
GAGAGCTGGAACCTGAAAGTGAAAGAGGAATACGAGAAGGTCGAGAAAGAGTACAAGACCCT
GGAAGAGAGGATCAAAGAGGACATCCAGGCTCTGAAGGCTCTGGAACAGTATGAGAAAGAGC
GGCAAGAACAGCTGCTGCGGGACACCCTGAACACCAACGAGTACCGGCTGAGCAAGAGAGGC
CTTAGAGGCTGGCGGGAAATCATCCAGAAATGGCTGAAAATGGACGAGAACGAGCCCTCCGA
GAAGTACCTGGAAGTGTTCAAGGACTACCAGCGGAAGCACCCTAGAGAGGCCGGCGATTACA
GCGTGTACGAGTTCCTGTCCAAGAAAGAGAACCACTTCATCTGGCGGAATCACCCTGAGTAC
CCCTACCTGTACGCCACCTTCTGCGAGATCGACAAGAAAAAGAAGGACGCCAAGCAGCAGGC
CACCTTCACACTGGCCGATCCTATCAATCACCCTCTGTGGGTCCGATTCGAGGAAAGAAGCG
GCAGCAACCTGAACAAGTACAGAATCCTGACCGAGCAGCTGCACACCGAGAAGCTGAAGAAA
AAGCTGACAGTGCAGCTGGACCGGCTGATCTACCCTACAGAATCTGGCGGCTGGGAAGAGAA
GGGCAAAGTGGACATTGTGCTGCTGCCCAGCCGGCAGTTCTACAACCAGATCTTCCTGGACA
TCGAGGAAAAGGGCAAGCACGCCTTCACCTACAAGGATGAGAGCATCAAGTTCCCTCTGAAG
GGCACACTCGGCGGAGCCAGAGTGCAGTTCGACAGAGATCACCTGAGAAGATACCCTCACAA
GGTGGAAAGCGGCAACGTGGGCAGAATCTACTTCAACATGACCGTGAACATCGAGCCTACAG
AGTCCCCAGTGTCCAAGTCTCTGAAGATCCACCGGGACGACTTCCCCAAGGTGGTCAACTTC
AAGCCCAAAGAACTGACCGAGTGGATCAAGGACAGCAAGGGCAAGAAACTGAAGTCCGGCAT
CGAGTCCCTGGAAATCGGCCTGAGAGTGATGAGCATCGACCTGGGACAGAGACAGGCCGCTG
CCGCCTCTATTTTCGAGGTGGTGGATCAGAAGCCCGACATCGAAGGCAAGCTGTTTTTCCCA
ATCAAGGGCACCGAGCTGTATGCCGTGCACAGAGCCAGCTTCAACATCAAGCTGCCCGGCGA
GACACTGGTCAAGAGCAGAGAAGTGCTGCGGAAGGCCAGAGAGGACAATCTGAAACTGATGA
ACCAGAAGCTCAACTTCCTGCGGAACGTGCTGCACTTCCAGCAGTTCGAGGACATCACCGAG
AGAGAGAAGCGGGTCACCAAGTGGATCAGCAGACAAGAGAACAGCGACGTGCCCCTGGTGTA
CCAGGATGAGCTGATCCAGATCCGCGAGCTGATGTACAAGCCTTACAAGGACTGGGTCGCCT
TCCTGAAGCAGCTCCACAAGAGACTGGAAGTCGAGATCGGCAAAGAAGTGAAGCACTGGCGG
AAGTCCCTGAGCGACGGAAGAAAGGGCCTGTACGGCATCTCCCTGAAGAACATCGACGAGAT
CGATCGGACCCGGAAGTTCCTGCTGAGATGGTCCCTGAGGCCTACCGAACCTGGCGAAGTGC
GTAGACTGGAACCCGGCCAGAGATTCGCCATCGACCAGCTGAATCACCTGAACGCCCTGAAA
GAAGATCGGCTGAAGAAGATGGCCAACACCATCATCATGCACGCCCTGGGCTACTGCTACGA
CGTGCGGAAGAAGAAATGGCAGGCTAAGAACCCCGCCTGCCAGATCATCCTGTTCGAGGATC
TGAGCAACTACAACCCCTACGAGGAAAGGTCCCGCTTCGAGAACAGCAAGCTCATGAAGTGG
TCCAGACGCGAGATCCCCAGACAGGTTGCACTGCAGGGCGAGATCTATGGCCTGCAAGTGGG
AGAAGTGGGCGCTCAGTTCAGCAGCAGATTCCACGCCAAGACAGGCAGCCCTGGCATCAGAT
GTAGCGTCGTGACCAAAGAGAAGCTGCAGGACAATCGGTTCTTCAAGAATCTGCAGAGAGAG
GGCAGACTGACCCTGGACAAAATCGCCGTGCTGAAAGAGGGCGATCTGTACCCAGACAAAGG
CGGCGAGAAGTTCATCAGCCTGAGCAAGGATCGGAAGTGCGTGACCACACACGCCGACATCA
ACGCCGCTCAGAACCTGCAGAAGCGGTTCTGGACAAGAACCCACGGCTTCTACAAGGTGTAC

[chemical structure]

[chemical structure]

[chemical structure]

[chemical structure]

[chemical structure]

[chemical structure]

[chemical structure]

[chemical structure]

GAGCAAGGACCAGAAGCAGAAGATCATCGAAGAGTTCGGCGAGGGCTACTTCATTCTGAAGG
ACGGGGTGTACGAATGGGTCAACGCCGGCAAGCTGAAAATCAAGAAGGGCAGCTCCAAGCAG
AGCAGCAGCGAGCTGGTGGATAGCGACATCCTGAAAGACAGCTTCGACCTGGCCTCCGAGCT
GAAAGGCGAAAAGCTGATGCTGTACAGGGACCCCAGCGGCAATGTGTTCCCCAGCGACAAAT
GGATGGCCGCTGGCGTGTTCTTCGGAAAGCTGGAACGCATCCTGATCAGCAAGCTGACCAAC
CAGTACTCCATCAGCACCATCGAGGACGACAGCAGCAAGCAGTCTATGAAAAGGCCGGCGGC
CACGAAAAAGGCCGGCCAGGCAAAAAAGAAAAAG [symbol] TACCCATACGATGTTCCAGATT
ACGCTTATCCCTACGACGTGCCTGATTATGCATACCCATATGATGTCCCCGACTATGCCTAA
MAPKKKRKVGIHGVPAAATRSFILKIEPNEEVKKGLWKTHEVLNHGIAYYMNILKLIRQEAI
YEHHEQDPKNPKKVSKAEIQAELWDFVLKMQKCNSFTHEVDKDEVFNILRELYEELVPSSVE
KKGEANQLSNKFLYPLVDPNSQSGKGTASSGRKPRWYNLKIAGDPSWEEEKKKWEEDKKKDP
LAKILGKLAEYGLIPLFIPYTDSNEPIVKEIKWMEKSRNQSVRRLDKDMFIQALERFLSWES
WNLKVKEEYEKVEKEYKTLEERIKEDIQALKALEQYEKERQEQLLRDTLNTNEYRLSKRGLR
GWREIIQKWLKMDENEPSEKYLEVFKDYQRKHPREAGDYSVYEFLSKKENHFIWRNHPEYPY
LYATFCEIDKKKKDAKQQATFTLADPINHPLWVRFEERSGSNLNKYRILTEQLHTEKLKKKL
TVQLDRLIYPTESGGWEEKGKVDIVLLPSRQFYNQIFLDIEEKGKHAFTYKDESIKFPLKGT
LGGARVQFDRDHLRRYPHKVESGNVGRIYFNMTVNIEPTESPVSKSLKIHRDDFPKVVNFKP
KELTEWIKDSKGKKLKSGIESLEIGLRVMSIDLGQRQAAAASIFEVVDQKPDIEGKLFFPIK
GTELYAVHRASFNIKLPGETLVKSREVLRKAREDNLKLMNQKLNFLRNVLHFQQFEDITERE
KRVTKWISRQENSDVPLVYQDELIQIRELMYKPYKDWVAFLKQLHKRLEVEIGKEVKHWRKS
LSDGRKGLYGISLKNIDEIDRTRKFLLRWSLRPTEPGEVRRLEPGQRFAIDQLNHLNALKED
RLKKMANTIIMHALGYCYDVRKKKWQAKNPACQIILFEDLSNYNPYEERSRFENSKLMKWSR
REIPRQVALQGEIYGLQVGEVGAQFSSRFHAKTGSPGIRCSVVTKEKLQDNRFFKNLQREGR
LTLDKIAVLKEGDLYPDKGGEKFISLSKDRKCVTTHADINAAQNLQKRFWTRTHGFYKVYCK
AYQVDGGSGGSSEVEFSHEYWMRHALTLAKRARDEREVPVGAVLVLNNRVIGEGWNRAIGLH
DPTAHAEIMALRQGGLVMQNYRLYDATLYVTFEPCVMCAGAMIHSRIGRVVFGVRNAKTGAA
GSLMDVLHHPGMNHRVEITEGILADECAALLCRFFRMPRRVFNAQKKAQSSTDGSSGSETPG
TSESATPESSGGQTVYIPESKDQKQKIIEEFGEGYFILKDGVYEWVNAGKLKIKKGSSKQSS
SELVDSDILKDSFDLASELKGEKLMLYRDPSGNVFPSDKWMAAGVFFGKLERILISKLTNQY
SISTIEDDSSKQSMKRPAATKKAGQAKKKKGSYPYDVPDYAYPYDVPDYAYPYDVPDYA

### BhCas12b GGSGGS-ABE8-Xten20 at K1019

GCCACC [symbol] [symbol] [symbol] GCCAC
CAGATCCTTCATCCTGAAGATCGAGCCCAACGAGGAAGTGAAGAAAGGCCTCTGGAAAACCC
ACGAGGTGCTGAACCACGGAATCGCCTACTACATGAATATCCTGAAGCTGATCCGGCAAGAG
GCCATCTACGAGCACCACGAGCAGGACCCCAAGAATCCCAAGAAGGTGTCCAAGGCCGAGAT
CCAGGCCGAGCTGTGGGATTTCGTGCTGAAGATGCAGAAGTGCAACAGCTTCACACACGAGG
TGGACAAGGACGAGGTGTTCAACATCCTGAGAGAGCTGTACGAGGAACTGGTGCCCAGCAGC
GTGGAAAAGAAGGGCGAAGCCAACCAGCTGAGCAACAAGTTTCTGTACCCTCTGGTGGACCC
CAACAGCCAGTCTGGAAAGGGAACAGCCAGCAGCGGCAGAAAGCCCAGATGGTACAACCTGA
AGATTGCCGGCGATCCCTCCTGGGAAGAAGAGAAGAAGAAGTGGGAAGAAGATAAGAAAAAG
GACCCGCTGGCCAAGATCCTGGGCAAGCTGGCTGAGTACGGACTGATCCCTCTGTTCATCCC
CTACACCGACAGCAACGAGCCCATCGTGAAAGAAATCAAGTGGATGGAAAAGTCCCGGAACC
AGAGCGTGCGGCGGCTGGATAAGGACATGTTCATTCAGGCCCTGGAACGGTTCCTGAGCTGG
GAGAGCTGGAACCTGAAAGTGAAAGAGGAATACGAGAAGGTCGAGAAAGAGTACAAGACCCT
GGAAGAGAGGATCAAAGAGGACATCCAGGCTCTGAAGGCTCTGGAACAGTATGAGAAAGAGC
GGCAAGAACAGCTGCTGCGGGACACCCTGAACACCAACGAGTACCGGCTGAGCAAGAGAGGC
CTTAGAGGCTGGCGGGAAATCATCCAGAAATGGCTGAAAATGGACGAGAACGAGCCCTCCGA
GAAGTACCTGGAAGTGTTCAAGGACTACCAGCGGAAGCACCCTAGAGAGGCCGGCGATTACA
GCGTGTACGAGTTCCTGTCCAAGAAAGAGAACCACTTCATCTGGCGGAATCACCCTGAGTAC
CCCTACCTGTACGCCACCTTCTGCGAGATCGACAAGAAAAAGAAGGACGCCAAGCAGCAGGC
CACCTTCACACTGGCCGATCCTATCAATCACCCTCTGTGGGTCCGATTCGAGGAAAGAAGCG
GCAGCAACCTGAACAAGTACAGAATCCTGACCGAGCAGCTGCACACCGAGAAGCTGAAGAAA
AAGCTGACAGTGCAGCTGGACCGGCTGATCTACCCTACAGAATCTGGCGGCTGGGAAGAGAA
GGGCAAAGTGGACATTGTGCTGCTGCCCAGCCGGCAGTTCTACAACCAGATCTTCCTGGACA
TCGAGGAAAAGGGCAAGCACGCCTTCACCTACAAGGATGAGAGCATCAAGTTCCCTCTGAAG
GGCACACTCGGCGGAGCCAGAGTGCAGTTCGACAGAGATCACCTGAGAAGATACCCTCACAA
GGTGGAAAGCGGCAACGTGGGCAGAATCTACTTCAACATGACCGTGAACATCGAGCCTACAG
AGTCCCCAGTGTCCAAGTCTCTGAAGATCCACCGGGACGACTTCCCCAAGGTGGTCAACTTC
AAGCCCAAAGAACTGACCGAGTGGATCAAGGACAGCAAGGGCAAGAAACTGAAGTCCGGCAT
CGAGTCCCTGGAAATCGGCCTGAGAGTGATGAGCATCGACCTGGGACAGAGACAGGCCGCTG
CCGCCTCTATTTTCGAGGTGGTGGATCAGAAGCCCGACATCGAAGGCAAGCTGTTTTTCCCA
ATCAAGGGCACCGAGCTGTATGCCGTGCACAGAGCCAGCTTCAACATCAAGCTGCCCGGCGA
GACACTGGTCAAGAGCAGAGAAGTGCTGCGGAAGGCCAGAGAGGACAATCTGAAACTGATGA
ACCAGAAGCTCAACTTCCTGCGGAACGTGCTGCACTTCCAGCAGTTCGAGGACATCACCGAG
AGAGAGAAGCGGGTCACCAAGTGGATCAGCAGACAAGAGAACAGCGACGTGCCCCTGGTGTA
CCAGGATGAGCTGATCCAGATCCGCGAGCTGATGTACAAGCCTTACAAGGACTGGGTCGCCT
TCCTGAAGCAGCTCCACAAGAGACTGGAAGTCGAGATCGGCAAAGAAGTGAAGCACTGGCGG
AAGTCCCTGAGCGACGGAAGAAAGGGCCTGTACGGCATCTCCCTGAAGAACATCGACGAGAT
CGATCGGACCCGGAAGTTCCTGCTGAGATGGTCCCTGAGGCCTACCGAACCTGGCGAAGTGC
GTAGACTGGAACCCGGCCAGAGATTCGCCATCGACCAGCTGAATCACCTGAACGCCCTGAAA
GAAGATCGGCTGAAGAAGATGGCCAACACCATCATCATGCACGCCCTGGGCTACTGCTACGA
CGTGCGGAAGAAGAAATGGCAGGCTAAGAACCCCGCCTGCCAGATCATCCTGTTCGAGGATC
TGAGCAACTACAACCCCTACGAGGAAAGGTCCCGCTTCGAGAACAGCAAGCTCATGAAGTGG
TCCAGACGCGAGATCCCCAGACAGGTTGCACTGCAGGGCGAGATCTATGGCCTGCAAGTGGG
AGAAGTGGGCGCTCAGTTCAGCAGCAGATTCCACGCCAAGACAGGCAGCCCTGGCATCAGAT
GTAGCGTCGTGACCAAAGAGAAGCTGCAGGACAATCGGTTCTTCAAGAATCTGCAGAGAGAG
GGCAGACTGACCCTGGACAAAATCGCCGTGCTGAAAGAGGGCGATCTGTACCCAGACAAAGG
CGGCGAGAAGTTCATCAGCCTGAGCAAGGATCGGAAGTGCGTGACCACACACGCCGACATCA
ACGCCGCTCAGAACCTGCAGAAGCGGTTCTGGACAAGAACCCACGGCTTCTACAAGGTGTAC
TGCAAGGCCTACCAGGTGGACGGCCAGACCGTGTACATCCCTGAGAGCAAGGACCAGAAGCA
GAAGATCATCGAAGAGTTCGGCGAGGGCTACTTCATTCTGAAGGACGGGGTGTACGAATGGG

[chemical structure]

[chemical structure]

[chemical structure]

[chemical structure]

[chemical structure]

[chemical structure]

[chemical structure]

[chemical structure]

[chemical structure]

CAAGCGAGAGCGCCACCCCTGAGAGCTCTGGCCTGAAAATCAAGAAGGGCAGCTCCAAGCAG
AGCAGCAGCGAGCTGGTGGATAGCGACATCCTGAAAGACAGCTTCGACCTGGCCTCCGAGCT
GAAAGGCGAAAAGCTGATGCTGTACAGGGACCCCAGCGGCAATGTGTTCCCCAGCGACAAAT
GGATGGCCGCTGGCGTGTTCTTCGGAAAGCTGGAACGCATCCTGATCAGCAAGCTGACCAAC
CAGTACTCCATCAGCACCATCGAGGACGACAGCAGCAAGCAGTCTATGAAAAGGCCGGCGGC
CACGAAAAAGGCCGGCCAGGCAAAAAAGAAAAAG [symbol] TACCCATACGATGTTCCAGATT
ACGCTTATCCCTACGACGTGCCTGATTATGCATACCCATATGATGTCCCCGACTATGCCTAA
MAPKKKRKVGIHGVPAAATRSFILKIEPNEEVKKGLWKTHEVLNHGIAYYMNILKLIRQEAI
YEHHEQDPKNPKKVSKAEIQAELWDFVLKMQKCNSFTHEVDKDEVFNILRELYEELVPSSVE
KKGEANQLSNKFLYPLVDPNSQSGKGTASSGRKPRWYNLKIAGDPSWEEEKKKWEEDKKKDP
LAKILGKLAEYGLIPLFIPYTDSNEPIVKEIKWMEKSRNQSVRRLDKDMFIQALERELSWES
WNLKVKEEYEKVEKEYKTLEERIKEDIQALKALEQYEKERQEQLLRDTLNTNEYRLSKRGLR
GWREIIQKWLKMDENEPSEKYLEVFKDYQRKHPREAGDYSVYEFLSKKENHFIWRNHPEYPY
LYATFCEIDKKKKDAKQQATFTLADPINHPLWVRFEERSGSNLNKYRILTEQLHTEKLKKKL
TVOLDRLIYPTESGGWEEKGKVDIVLLPSRQFYNQIFLDIEEKGKHAFTYKDESIKFPLKGT
LGGARVQFDRDHLRRYPHKVESGNVGRIYFNMTVNIEPTESPVSKSLKIHRDDFPKVVNFKP
KELTEWIKDSKGKKLKSGIESLEIGLRVMSIDLGQRQAAAASIFEVVDQKPDIEGKLFFPIK
GTELYAVHRASFNIKLPGETLVKSREVLRKAREDNLKLMNQKLNFLRNVLHFQQFEDITERE
KRVTKWISRQENSDVPLVYQDELIQIRELMYKPYKDWVAFLKQLHKRLEVEIGKEVKHWRKS
LSDGRKGLYGISLKNIDEIDRTRKFLLRWSLRPTEPGEVRRLEPGQRFAIDQLNHLNALKED
RLKKMANTIIMHALGYCYDVRKKKWQAKNPACQIILFEDLSNYNPYEERSRFENSKLMKWSR
REIPRQVALQGEIYGLQVGEVGAQFSSRFHAKTGSPGIRCSVVTKEKLQDNRFFKNLQREGR
LTLDKIAVLKEGDLYPDKGGEKFISLSKDRKCVTTHADINAAQNLQKRFWTRTHGFYKVYCK
AYQVDGQTVYIPESKDQKQKIIEEFGEGYFILKDGVYEWVNAGKGGSGGSSEVEFSHEYWMR
HALTLAKRARDEREVPVGAVLVLNNRVIGEGWNRAIGLHDPTAHAEIMALRQGGLVMQNYRL
YDATLYVTFEPCVMCAGAMIHSRIGRVVFGVRNAKTGAAGSLMDVLHHPGMNHRVEITEGIL
ADECAALLCRFFRMPRRVFNAQKKAQSSTDGSSGSETPGTSESATPESSGLKIKKGSSKQSS
SELVDSDILKDSFDLASELKGEKLMLYRDPSGNVFPSDKWMAAGVFFGKLERILISKLTNQY
SISTIEDDSSKQSMKRPAATKKAGQAKKKKGSYPYDVPDYAYPYDVPDYAYPYDVPDYA

[0347] For the sequences above, the Kozak sequence is bolded and underlined; [symbol] marks the N-terminal nuclear localization signal (NLS) following the Kozak sequence; lower case characters denote the GGGSGGS linker; [symbol] marks the sequence encoding ABE8, unmodified sequence encodes BhCas12b; double underling denotes the Xten20 linker; single underlining denotes the C-terminal NLS; [symbol] denotes the GS linker; and italicized characters represent the coding sequence of the 3× hemagglutinin (HA) tag.

[0348] In some embodiments, the nucleic acid programmable DNA binding protein (napDNAbp) of any of the fusion proteins provided herein may be a Cas12j/CasΦ protein. Cas12j/CasΦ is described in Pausch et al., “CRISPR-CasΦ from huge phages is a hypercompact genome editor,” Science, 17 Jul. 2020, Vol. 369, Issue 6501, pp. 333-337, which is incorporated herein by reference in its entirety. In some embodiments, the napDNAbp comprises an amino acid sequence that is at least 85%, at least 90%, at least 91%, at least 92%, at least 93%, at least 94%, at least 95%, at least 96%, at least 97%, at least 98%, at least 99%, or at ease 99.5% identical to a naturally-occurring Cas12j/CasΦ protein. In some embodiments, the napDNAbp is a naturally-occurring Cas12j/CasΦ protein. In some embodiments, the napDNAbp is a nuclease inactive (“dead”) Cas12j/CasΦ protein. It should be appreciated that Cas12j/CasΦ from other species may also be used in accordance with the present disclosure.

Exemplary Cas12j/CasΦ amino acid sequences follow:
[0349] CasΦ-1

MADTPTLETQELRHHLPGQRFRKDILKQAGRILAN
KGEDATIAFLRGKSEESPPDFQPPVKCPIIACSRP
LTEWPIYQASVAIQGYVYGQSLAEFEASDPGCSKD
GLLGWFDKTGVCTDYFSVQGLNLIFQNARKRYIGV
QTKVTNRNEKRHKKLKRINAKRIAEGLPELTSDEP
ESALDETGHLIDPPGLNTNIYCYQQVSPKPLALSE
VNQLPTAYAGYSTSGDDPIQPMVTKDRLSISKGQP
GYIPEHQRALLSQKKHRRMRGYGLKARALLVIVRI
QDDWAVIDLRSLLRNAYWRRIVQTKEPSTITKLLK
LVTGDPVLDATRMVATFTYKPGIVQVRSAKCLKNK
QGSKLFSERYLNETVSVTSIDLGSNNLVAVATYRL
VNGNTPELLQRFTLPSHLVKDFERYKQAHDTLEDS
IQKTAVASLPQGQQTEIRMWSMYGFREAQERVCQE
LGLADGSIPWNVMTATSTILTDLFLARGGDPKKCM
FTSEPKKKKNSKQVLYKIRDRAWAKMYRTLLSKET
REAWNKALWGLKRGSPDYARLSKRKEELARRCVNY
TISTAEKRAQCGRTIVALEDLNIGFFHGRGKQEPG
WVGLFTRKKENRWLMQALHKAFLELAHHRGYHVIE
VNPAYTSQTCPVCRHCDPDNRDQHNREAFHCIGCG
FRGNADLDVATHNIAMVAITGESLKRARGSVASKT
PQPLAAE*

[0350] CasΦ-2

MPKPAVESEFSKVLKKHFPGERFRSSYMKRGGKILAAQGEEAVVAYLQGKSEEEPPNFQPPA
KCHVVTKSRDFAEWPIMKASEAIQRYIYALSTTERAACKPGKSSESHAAWFAATGVSNHGYS
HVQGLNLIFDHTLGRYDGVLKKVQLRNEKARARLESINASRADEGLPEIKAEEEEVATNETG
HLLQPPGINPSFYVYQTISPQAYRPRDEIVLPPEYAGYVRDPNAPIPLGVVRNRCDIQKGCP
GYIPEWQREAGTAISPKTGKAVTVPGLSPKKNKRMRRYWRSEKEKAQDALLVTVRIGTDWVV
IDVRGLLRNARWRTIAPKDISLNALLDLFTGDPVIDVRRNIVTFTYTLDACGTYARKWTLKG
KQTKATLDKLTATQTVALVAIDLGQTNPISAGISRVTQENGALQCEPLDRFTLPDDLLKDIS
AYRIAWDRNEEELRARSVEALPEAQQAEVRALDGVSKETARTQLCADFGLDPKRLPWDKMSS
NTTFISEALLSNSVSRDQVFFTPAPKKGAKKKAPVEVMRKDRTWARAYKPRLSVEAQKLKNE
ALWALKRTSPEYLKLSRRKEELCRRSINYVIEKTRRRTQCQIVIPVIEDLNVRFFHGSGKRL
PGWDNFFTAKKENRWFIQGLHKAFSDLRTHRSFYVFEVRPERTSITCPKCGHCEVGNRDGEA
FQCLSCGKTCNADLDVATHNLTQVALTGKTMPKREEPRDAQGTAPARKTKKASKSKAPPAER
EDQTPAQEPSQTS

[0351] CasΦ-3

MEKEITELTKIRREFPNKKFSSTDMKKAGKLLKAEGPDAVRDFLNSCQEIIGDFKPPVKTNI
VSISRPFEEWPVSMVGRAIQEYYFSLTKEELESVHPGTSSEDHKSFFNITGLSNYNYTSVQG
LNLIFKNAKAIYDGTLVKANNKNKKLEKKFNEINHKRSLEGLPIITPDFEEPFDENGHLNNP
PGINRNIYGYQGCAAKVFVPSKHKMVSLPKEYEGYNRDPNLSLAGFRNRLEIPEGEPGHVPW
FQRMDIPEGQIGHVNKIQRFNFVHGKNSGKVKFSDKTGRVKRYHHSKYKDATKPYKFLEESK
KVSALDSILAIITIGDDWVVFDIRGLYRNVFYRELAQKGLTAVQLLDLETGDPVIDPKKGVV
TFSYKEGVVPVFSQKIVPRFKSRDTLEKLTSQGPVALLSVDLGQNEPVAARVCSLKNINDKI
TLDNSCRISFLDDYKKQIKDYRDSLDELEIKIRLEAINSLETNQQVEIRDLDVFSADRAKAN
TVDMFDIDPNLISWDSMSDARVSTQISDLYLKNGGDESRVYFEINNKRIKRSDYNISQLVRP
KLSDSTRKNLNDSIWKLKRTSEEYLKLSKRKLELSRAVVNYTIRQSKLLSGINDIVIILEDL
DVKKKFNGRGIRDIGWDNFFSSRKENRWFIPAFHKAFSELSSNRGLCVIEVNPAWTSATCPD
CGFCSKENRDGINFTCRKCGVSYHADIDVATLNIARVAVLGKPMSGPADRERLGDTKKPRVA
RSRKTMKRKDISNSTVEAMVTA*

[0352] CasΦ-4

MYSLEMADLKSEPSLLAKLLRDREPGKYWLPKYWKLAEKKRLTGGEEAACEYMADKQLDSPP
PNFRPPARCVILAKSRPFEDWPVHRVASKAQSFVIGLSEQGFAALRAAPPSTADARRDWLRS
HGASEDDLMALEAQLLETIMGNAISLHGGVLKKIDNANVKAAKRLSGRNEARLNKGLQELPP
EQEGSAYGADGLLVNPPGLNLNIYCRKSCCPKPVKNTARFVGHYPGYLRDSDSILISGTMDR
LTIIEGMPGHIPAWQREQGLVKPGGRRRRLSGSESNMRQKVDPSTGPRRSTRSGTVNRSNQR
TGRNGDPLLVEIRMKEDWVLLDARGLLRNLRWRESKRGLSCDHEDLSLSGLLALFSGDPVID
PVRNEVVFLYGEGIIPVRSTKPVGTRQSKKLLERQASMGPLTLISCDLGQTNLIAGRASAIS
LTHGSLGVRSSVRIELDPEIIKSFERLRKDADRLETEILTAAKETLSDEQRGEVNSHEKDSP
QTAKASLCRELGLHPPSLPWGQMGPSTTFIADMLISHGRDDDAFLSHGEFPTLEKRKKFDKR
FCLESRPLLSSETRKALNESLWEVKRTSSEYARLSQRKKEMARRAVNFVVEISRRKTGLSNV
IVNIEDLNVRIFHGGGKQAPGWDGFFRPKSENRWFIQAIHKAFSDLAAHHGIPVIESDPQRT
SMTCPECGHCDSKNRNGVRFLCKGCGASMDADFDAACRNLERVALTGKPMPKPSTSCERLLS
ATTGKVCSDHSLSHDAIEKAS*

[0353] CasΦ-5

MSSLPTPLELLKQKHADLFKGLQFSSKDNKMAGKVLKKDGEEAALAELSERGVSRGELPNFR
PPAKTLVVAQSRPFEEFPIYRVSEAIQLYVYSLSVKELETVPSGSSTKKEHQRFFQDSSVPD
FGYTSVQGLNKIFGLARGIYLGVITRGENQLQKAKSKHEALNKKRRASGEAETEFDPTPYEY
MTPERKLAKPPGVNHSIMCYVDISVDEFDFRNPDGIVLPSEYAGYCREINTAIEKGTVDRLG
HLKGGPGYIPGHQRKESTTEGPKINFRKGRIRRSYTALYAKRDSRRVRQGKLALPSYRHHMM
RLNSNAESAILAVIFFGKDWVVFDLRGLLRNVRWRNLFVDGSTPSTLLGMFGDPVIDPKRGV
VAFCYKEQIVPVVSKSITKMVKAPELLNKLYLKSEDPLVLVAIDLGQTNPVGVGVYRVMNAS
LDYEVVTRFALESELLREIESYRQRTNAFEAQIRAETFDAMTSEEQEEITRVRAFSASKAKE
NVCHRFGMPVDAVDWATMGSNTIHIAKWVMRHGDPSLVEVLEYRKDNEIKLDKNGVPKKVKL
TDKRIANLTSIRLRFSQETSKHYNDTMWELRRKHPVYQKLSKSKADFSRRVVNSIIRRVNHL
VPRARIVFIIEDLKNLGKVFHGSGKRELGWDSYFEPKSENRWFIQVLHKAFSETGKHKGYYI
IECWPNWTSCTCPKCSCCDSENRHGEVFRCLACGYTCNTDFGTAPDNLVKIATTGKGLPGPK
KRCKGSSKGKNPKIARSSETGVSVTESGAPKVKKSSPTQTSQSSSQSAP*

[0354] CasΦ-6

MNKIEKEKTPLAKLMNENFAGLREPFAIIKQAGKKLLKEGELKTIEYMTGKGSIEPLPNFKP
PVKCLIVAKRRDLKYFPICKASCEIQSYVYSLNYKDFMDYFSTPMTSQKQHEEFFKKSGLNI
EYQNVAGLNLIFNNVKNTYNGVILKVKNRNEKLKKKAIKNNYEFEEIKTFNDDGCLINKPGI
NNVIYCFQSISPKILKNITHLPKEYNDYDCSVDRNIIQKYVSRLDIPESQPGHVPEWQRKLP
EFNNTNNPRRRRKWYSNGRNISKGYSVDQVNQAKIEDSLLAQIKIGEDWIILDIRGLLRDLN
RRELISYKNKLTIKDVLGFFSDYPIIDIKKNLVTFCYKEGVIQVVSQKSIGNKKSKQLLEKL
IENKPIALVSIDLGQTNPVSVKISKLNKINNKISIESFTYRFLNEEILKEIEKYRKDYDKLE
LKLINEA

[0355] CasΦ-7

MSNTAVSTREHMSNKTTPPSPLSLLLRAHFPGLKFESQDYKIAGKKLRDGGPEAVISYLTGK
GQAKLKDVKPPAKAFVIAQSRPFIEWDLVRVSRQIQEKIFGIPATKGRPKQDGLSETAFNEA
VASLEVDGKSKLNEETRAAFYEVLGLDAPSLHAQAQNALIKSAISIREGVLKKVENRNEKNL
SKTKRRKEAGEEATFVEEKAHDERGYLIHPPGVNQTIPGYQAVVIKSCPSDFIGLPSGCLAK
ESAEALTDYLPHDRMTIPKGQPGYVPEWQHPLLNRRKNRRRRDWYSASLNKPKATCSKRSGT
PNRKNSRTDQIQSGRFKGAIPVLMRFQDEWVIIDIRGLLRNARYRKLLKEKSTIPDLLSLFT
GDPSIDMRQGVCTFIYKAGQACSAKMVKTKNAPEILSELTKSGPVVLVSIDLGQTNPIAAKV
SRVTQLSDGQLSHETLLRELLSNDSSDGKEIARYRVASDRLRDKLANLAVERLSPEHKSEIL
RAKNDTPALCKARVCAALGLNPEMIAWDKMTPYTEFLATAYLEKGGDRKVATLKPKNRPEML
RRDIKFKGTEGVRIEVSPEAAEAYREAQWDLQRTSPEYLRLSTWKQELTKRILNQLRHKAAK
SSQCEVVVMAFEDLNIKMMHGNGKWADGGWDAFFIKKRENRWFMQAFHKSLTELGAHKGVPT
IEVTPHRTSITCTKCGHCDKANRDGERFACQKCGFVAHADLEIATDNIERVALTGKPMPKPE
SERSGDAKKSVGARKAAFKPEEDAEAAE*

[0356] CasΦ-8

MIKPTVSQFLTPGFKLIRNHSRTAGLKLKNEGEEACKKEVRENEIPKDECPNFQGGPAIANI
IAKSREFTEWEIYQSSLAIQEVIFTLPKDKLPEPILKEEWRAQWLSEHGLDTVPYKEAAGLN
LIIKNAVNTYKGVQVKVDNKNKNNLAKINRKNEIAKLNGEQEISFEEIKAFDDKGYLLQKPS
PNKSIYCYQSVSPKPFITSKYHNVNLPEEYIGYYRKSNEPIVSPYQFDRLRIPIGEPGYVPK
WQYTFLSKKENKRRKLSKRIKNVSPILGIICIKKDWCVFDMRGLLRTNHWKKYHKPTDSIND
LFDYFTGDPVIDTKANVVRFRYKMENGIVNYKPVREKKGKELLENICDQNGSCKLATVDVGQ
NNPVAIGLFELKKVNGELTKTLISRHPTPIDFCNKITAYRERYDKLESSIKLDAIKQLTSEQ
KIEVDNYNNNFTPQNTKQIVCSKLNINPNDLPWDKMISGTHFISEKAQVSNKSEIYFTSTDK
GKTKDVMKSDYKWFQDYKPKLSKEVRDALSDIEWRLRRESLEFNKLSKSREQDARQLANWIS
SMCDVIGIENLVKKNNFFGGSGKREPGWDNFYKPKKENRWWINAIHKALTELSQNKGKRVIL
LPAMRTSITCPKCKYCDSKNRNGEKFNCLKCGIELNADIDVATENLATVAITAQSMPKPTCE
RSGDAKKPVRARKAKAPEFHDKLAPSYTVVLREAV*

[0357] CasΦ-9

MRSSREIGDKILMRQPAEKTAFQVFRQEVIGTQKLSGGDAKTAGRLYKQGKMEAAREWLLKG
ARDDVPPNFQPPAKCLVVAVSHPFEEWDISKTNHDVQAYIYAQPLQAEGHLNGLSEKWEDTS
ADQHKLWFEKTGVPDRGLPVQAINKIAKAAVNRAFGVVRKVENRNEKRRSRDNRIAEHNREN
GLTEVVREAPEVATNADGFLLHPPGIDPSILSYASVSPVPYNSSKHSFVRLPEEYQAYNVEP
DAPIPQFVVEDRFAIPPGQPGYVPEWQRLKCSTNKHRRMRQWSNQDYKPKAGRRAKPLEFQA
HLTRERAKGALLVVMRIKEDWVVFDVRGLLRNVEWRKVLSEEAREKLTLKGLLDLFTGDPVI
DTKRGIVTFLYKAEITKILSKRTVKTKNARDLLLRLTEPGEDGLRREVGLVAVDLGQTHPIA
AAIYRIGRTSAGALESTVLHRQGLREDQKEKLKEYRKRHTALDSRLRKEAFETLSVEQQKEI
VTVSGSGAQITKDKVCNYLGVDPSTLPWEKMGSYTHFISDDFLRRGGDPNIVHFDRQPKKGK
VSKKSQRIKRSDSQWVGRMRPRLSQETAKARMEADWAAQNENEEYKRLARSKQELARWCVNT
LLQNTRCITQCDEIVVVIEDLNVKSLHGKGAREPGWDNFFTPKTENRWFIQILHKTFSELPK
HRGEHVIEGCPLRTSITCPACSYCDKNSRNGEKFVCVACGATFHADFEVATYNLVRLATTGM
PMPKSLERQGGGEKAGGARKARKKAKQVEKIVVQANANVTMNGASLHSP*

[0358] CasΦ-10

MDMLDTETNYATETPAQQQDYSPKPPKKAQRAPKGFSKKARPEKKPPKPITLETQKHFSGVR
FLKRVIRDASKILKLSESRTITFLEQAIERDGSAPPDVTPPVHNTIMAVTRPFEEWPEVILS
KALQKHCYALTKKIKIKTWPKKGPGKKCLAAWSARTKIPLIPGQVQATNGLFDRIGSIYDGV
EKKVTNRNANKKLEYDEAIKEGRNPAVPEYETAYNIDGTLINKPGYNPNLYITQSRTPRLIT
EADRPLVEKILWQMVEKKTQSRNQARRARLEKAAHLQGLPVPKFVPEKVDRSQKIEIRIIDP
LDKIEPYMPQDRMAIKASQDGHVPYWQRPFLSKRRNRRVRAGWGKQVSSIQAWLTGALLVIV
RLGNEAFLADIRGALRNAQWRKLLKPDATYQSLFNLFTGDPVVNTRTNHLTMAYREGVVNIV
KSRSFKGRQTREHLLTLLGQGKTVAGVSFDLGQKHAAGLLAAHFGLGEDGNPVFTPIQACFL
PQRYLDSLTNYRNRYDALTLDMRRQSLLALTPAQQQEFADAQRDPGGQAKRACCLKLNLNPD
EIRWDLVSGISTMISDLYIERGGDPRDVHQQVETKPKGKRKSEIRILKIRDGKWAYDFRPKI
ADETRKAQREQLWKLQKASSEFERLSRYKINIARAIANWALQWGRELSGCDIVIPVLEDLNV
GSKFFDGKGKWLLGWDNRFTPKKENRWFIKVLHKAVAELAPHRGVPVYEVMPHRTSMTCPAC
HYCHPTNREGDRFECQSCHVVKNTDRDVAPYNILRVAVEGKTLDRWQAEKKPQAEPDRPMIL
IDNQES*

The asterisk (*) in the sequences above denotes a STOP codon. Alternatively, CasΦ-1 is also termed Cas12j ortholog 1. Thus, CasΦ-1-CasΦ-10 may also be referred to as Cas12j orthologs 1-10, respectively.

### Guide Polynucleotides

[0359] In an embodiment, the guide polynucleotide is a guide RNA. As used herein, the term “guide RNA (gRNA)” and its grammatical equivalents can refer to an RNA which can be specific for a target DNA and can form a complex with Cas protein. An RNA/Cas complex can assist in “guiding” Cas protein to a target DNA. Cas9/crRNA/tracrRNA endonucleolytically cleaves linear or circular dsDNA target complementary to the spacer. The target strand not complementary to crRNA is first cut endonucleolytically, then trimmed 3′-5′ exonucleolytically. In nature, DNA-binding and cleavage typically requires protein and both RNAs. However, single guide RNAs (“sgRNA”, or simply “gRNA”) can be engineered so as to incorporate aspects of both the crRNA and tracrRNA into a single RNA species. See, e.g., Jinek M. et al., Science 337:816-821(2012), the entire contents of which is hereby incorporated by reference. Cas9 recognizes a short motif in the CRISPR repeat sequences (the PAM or protospacer adjacent motif) to help distinguish self-versus-non-self. Cas9 nuclease sequences and structures are well known to those of skill in the art (see e.g., “Complete genome sequence of an M1 strain of Streptococcus pyogenes.” Ferretti, J. J. et al., Proc. Natl. Acad. Sci. U.S.A. 98:4658-4663(2001); “CRISPR RNA maturation by trans-encoded small RNA and host factor RNase III.” Deltcheva E. et al., Nature 471:602-607(2011); and “Programmable dual-RNA-guided DNA endonuclease in adaptive bacterial immunity.” Jinek M. et al, Science 337:816-821(2012), the entire contents of each of which are incorporated herein by reference). Cas9 orthologs have been described in various species, including, but not limited to, S. pyogenes and S. thermophilus. Additional suitable Cas9 nucleases and sequences can be apparent to those of skill in the art based on this disclosure, and such Cas9 nucleases and sequences include Cas9 sequences from the organisms and loci disclosed in Chylinski, Rhun, and Charpentier, “The tracrRNA and Cas9 families of type II CRISPR-Cas immunity systems” (2013) RNA Biology 10:5, 726-737; the entire contents of which are incorporated herein by reference. In some embodiments, a Cas9 nuclease has an inactive (e.g., an inactivated) DNA cleavage domain, that is, the Cas9 is a nickase.

[0360] In some embodiments, the guide polynucleotide is at least one single guide RNA (“sgRNA” or “gRNA”). In some embodiments, the guide polynucleotide is at least one tracrRNA. In some embodiments, the guide polynucleotide does not require PAM sequence to guide the polynucleotide-programmable DNA-binding domain (e.g., Cas9 or Cpf1) to the target nucleotide sequence.

[0361] The polynucleotide programmable nucleotide binding domain (e.g., a CRISPR-derived domain) of the base editors disclosed herein can recognize a target polynucleotide sequence by associating with a guide polynucleotide. A guide polynucleotide (e.g., gRNA) is typically single-stranded and can be programmed to site-specifically bind (i.e., via complementary base pairing) to a target sequence of a polynucleotide, thereby directing a base editor that is in conjunction with the guide nucleic acid to the target sequence. A guide polynucleotide can be DNA. A guide polynucleotide can be RNA. As will be appreciated by one having skill in the art, in a guide polynucleotide sequence uracil (U) replaces thymine (T) in the sequence. In some cases, the guide polynucleotide comprises natural nucleotides (e.g., adenosine). In some cases, the guide polynucleotide comprises non-natural (or unnatural) nucleotides (e.g., peptide nucleic acid or nucleotide analogs). In some cases, the targeting region of a guide nucleic acid sequence can be at least 15, 16, 17, 18, 19, 20, 21, 22, 23, 24, 25, 26, 27, 28, 29, or 30 nucleotides in length. A targeting region of a guide nucleic acid can be between 10-30 nucleotides in length, or between 15-25 nucleotides in length, or between 15-20 nucleotides in length. In some embodiments, a guide polynucleotide may be truncated by 1, 2, 3, 4, etc. nucleotides, particularly at the 5′ end. By way of nonlimiting example, a guide polynucleotide of 20 nucleotides in length may be truncated by 1, 2, 3, 4, etc. nucleotides, particularly at the 5′ end.

[0362] In some embodiments, a guide polynucleotide comprises two or more individual polynucleotides, which can interact with one another via for example complementary base pairing (e.g., a dual guide polynucleotide). For example, a guide polynucleotide can comprise a CRISPR RNA (crRNA) and a trans-activating CRISPR RNA (tracrRNA). For example, a guide polynucleotide can comprise one or more trans-activating CRISPR RNA (tracrRNA).

[0363] In type II CRISPR systems, targeting of a nucleic acid by a CRISPR protein (e.g., Cas9) typically requires complementary base pairing between a first RNA molecule (crRNA) comprising a sequence that recognizes the target sequence and a second RNA molecule (trRNA) comprising repeat sequences which forms a scaffold region that stabilizes the guide RNA-CRISPR protein complex. Such dual guide RNA systems can be employed as a guide polynucleotide to direct the base editors disclosed herein to a target polynucleotide sequence.

[0364] In some embodiments, the base editor provided herein utilizes a single guide polynucleotide (e.g., sgRNA). In some embodiments, the base editor provided herein utilizes a dual guide polynucleotide (e.g., dual gRNAs). In some embodiments, the base editor provided herein utilizes one or more guide polynucleotide (e.g., multiple gRNA). In some embodiments, a single guide polynucleotide is utilized for different base editors described herein. For example, a single guide polynucleotide can be utilized for a cytidine base editor and an adenosine base editor.

[0365] In other embodiments, a guide polynucleotide can comprise both the polynucleotide targeting portion of the nucleic acid and the scaffold portion of the nucleic acid in a single molecule (i.e., a single-molecule guide nucleic acid). For example, a single-molecule guide polynucleotide can be a single guide RNA (sgRNA or gRNA). Herein the term guide polynucleotide sequence contemplates any single, dual or multi-molecule nucleic acid capable of interacting with and directing a base editor to a target polynucleotide sequence.

[0366] Typically, a guide polynucleotide (e.g., crRNA/trRNA complex or a gRNA) comprises a “polynucleotide-targeting segment” that includes a sequence capable of recognizing and binding to a target polynucleotide sequence, and a “protein-binding segment” that stabilizes the guide polynucleotide within a polynucleotide programmable nucleotide binding domain component of a base editor. In some embodiments, the polynucleotide targeting segment of the guide polynucleotide recognizes and binds to a DNA polynucleotide, thereby facilitating the editing of a base in DNA. In other cases, the polynucleotide targeting segment of the guide polynucleotide recognizes and binds to an RNA polynucleotide, thereby facilitating the editing of a base in RNA. Herein a “segment” refers to a section or region of a molecule, e.g., a contiguous stretch of nucleotides in the guide polynucleotide. A segment can also refer to a region/section of a complex such that a segment can comprise regions of more than one molecule. For example, where a guide polynucleotide comprises multiple nucleic acid molecules, the protein-binding segment of can include all or a portion of multiple separate molecules that are for instance hybridized along a region of complementarity. In some embodiments, a protein-binding segment of a DNA-targeting RNA that comprises two separate molecules can comprise (i) base pairs 40-75 of a first RNA molecule that is 100 base pairs in length; and (ii) base pairs 10-25 of a second RNA molecule that is 50 base pairs in length. The definition of “segment,” unless otherwise specifically defined in a particular context, is not limited to a specific number of total base pairs, is not limited to any particular number of base pairs from a given RNA molecule, is not limited to a particular number of separate molecules within a complex, and can include regions of RNA molecules that are of any total length and can include regions with complementarity to other molecules.

[0367] A guide RNA or a guide polynucleotide can comprise two or more RNAs, e.g., CRISPR RNA (crRNA) and transactivating crRNA (tracrRNA). A guide RNA or a guide polynucleotide can sometimes comprise a single-chain RNA, or single guide RNA (sgRNA) formed by fusion of a portion (e.g., a functional portion) of crRNA and tracrRNA. A guide RNA or a guide polynucleotide can also be a dual RNA comprising a crRNA and a tracrRNA. Furthermore, a crRNA can hybridize with a target DNA.

[0368] As discussed above, a guide RNA or a guide polynucleotide can be an expression product. For example, a DNA that encodes a guide RNA can be a vector comprising a sequence coding for the guide RNA. A guide RNA or a guide polynucleotide can be transferred into a cell by transfecting the cell with an isolated guide RNA or plasmid DNA comprising a sequence coding for the guide RNA and a promoter. A guide RNA or a guide polynucleotide can also be transferred into a cell in other way, such as using virus-mediated gene delivery.

[0369] A guide RNA or a guide polynucleotide can be isolated. For example, a guide RNA can be transfected in the form of an isolated RNA into a cell or organism. A guide RNA can be prepared by in vitro transcription using any in vitro transcription system known in the art. A guide RNA can be transferred to a cell in the form of isolated RNA rather than in the form of plasmid comprising encoding sequence for a guide RNA.

[0370] A guide RNA or a guide polynucleotide can comprise three regions: a first region at the 5′ end that can be complementary to a target site in a chromosomal sequence, a second internal region that can form a stem loop structure, and a third 3′ region that can be single-stranded. A first region of each guide RNA can also be different such that each guide RNA guides a fusion protein to a specific target site. Further, second and third regions of each guide RNA can be identical in all guide RNAs.

[0371] A first region of a guide RNA or a guide polynucleotide can be complementary to sequence at a target site in a chromosomal sequence such that the first region of the guide RNA can base pair with the target site. In some cases, a first region of a guide RNA can comprise from or from about 10 nucleotides to 25 nucleotides (i.e., from 10 nucleotides to nucleotides; or from about 10 nucleotides to about 25 nucleotides; or from 10 nucleotides to about 25 nucleotides; or from about 10 nucleotides to 25 nucleotides) or more. For example, a region of base pairing between a first region of a guide RNA and a target site in a chromosomal sequence can be or can be about 10, 11, 12, 13, 14, 15, 16, 17, 18, 19, 20, 22, 23, 24, 25, or more nucleotides in length. In some embodiments, a first region of a guide RNA can be or can be about 19, 20, or 21 nucleotides in length.

[0372] A guide RNA or a guide polynucleotide can also comprise a second region that forms a secondary structure. For example, a secondary structure formed by a guide RNA can comprise a stem (or hairpin) and a loop. A length of a loop and a stem can vary. For example, a loop can range from or from about 3 to 10 nucleotides in length, and a stem can range from or from about 6 to 20 base pairs in length. A stem can comprise one or more bulges of 1 to 10 or about 10 nucleotides. The overall length of a second region can range from or from about 16 to 60 nucleotides in length. For example, a loop can be or can be about 4 nucleotides in length and a stem can be or can be about 12 base pairs.

[0373] A guide RNA or a guide polynucleotide can also comprise a third region at the 3′ end that can be essentially single-stranded. For example, a third region is sometimes not complementarity to any chromosomal sequence in a cell of interest and is sometimes not complementarity to the rest of a guide RNA. Further, the length of a third region can vary. A third region can be more than or more than about 4 nucleotides in length. For example, the length of a third region can range from or from about 5 to 60 nucleotides in length.

[0374] A guide RNA or a guide polynucleotide can target any exon or intron of a gene target. In some cases, a guide can target exon 1 or 2 of a gene, in other cases; a guide can target exon 3 or 4 of a gene. A composition can comprise multiple guide RNAs that all target the same exon or in some cases, multiple guide RNAs that can target different exons. An exon and an intron of a gene can be targeted.

[0375] A guide RNA or a guide polynucleotide can target a nucleic acid sequence of or of about 20 nucleotides. A target nucleic acid can be less than or less than about 20 nucleotides. A target nucleic acid can be at least or at least about 5, 10, 15, 16, 17, 18, 19, 20, 21, 22, 23, 24, 25, 30, or anywhere between 1-100 nucleotides in length. A target nucleic acid can be at most or at most about 5, 10, 15, 16, 17, 18, 19, 20, 21, 22, 23, 24, 25, 30, 40, 50, or anywhere between 1-100 nucleotides in length. A target nucleic acid sequence can be or can be about 20 bases immediately 5′ of the first nucleotide of the PAM. A guide RNA can target a nucleic acid sequence. A target nucleic acid can be at least or at least about 1-10, 1-20, 1-30, 1-40, 1-50, 1-60, 1-70, 1-80, 1-90, or 1-100 nucleotides.

[0376] A guide polynucleotide, for example, a guide RNA, can refer to a nucleic acid that can hybridize to another nucleic acid, for example, the target nucleic acid or protospacer in a genome of a cell. A guide polynucleotide can be RNA. A guide polynucleotide can be DNA. The guide polynucleotide can be programmed or designed to bind to a sequence of nucleic acid site-specifically. A guide polynucleotide can comprise a polynucleotide chain and can be called a single guide polynucleotide. A guide polynucleotide can comprise two polynucleotide chains and can be called a double guide polynucleotide. A guide RNA can be introduced into a cell or embryo as an RNA molecule. For example, a RNA molecule can be transcribed in vitro and/or can be chemically synthesized. An RNA can be transcribed from a synthetic DNA molecule, e.g., a gBlocks® gene fragment. A guide RNA can then be introduced into a cell or embryo as an RNA molecule. A guide RNA can also be introduced into a cell or embryo in the form of a non-RNA nucleic acid molecule, e.g., DNA molecule. For example, a DNA encoding a guide RNA can be operably linked to promoter control sequence for expression of the guide RNA in a cell or embryo of interest. A RNA coding sequence can be operably linked to a promoter sequence that is recognized by RNA polymerase III (Pol III). Plasmid vectors that can be used to express guide RNA include, but are not limited to, px330 vectors and px333 vectors. In some cases, a plasmid vector (e.g., px333 vector) can comprise at least two guide RNA-encoding DNA sequences.

[0377] Methods for selecting, designing, and validating guide polynucleotides, e.g., guide RNAs and targeting sequences are described herein and known to those skilled in the art. For example, to minimize the impact of potential substrate promiscuity of a deaminase domain in the nucleobase editor system (e.g., an AID domain), the number of residues that could unintentionally be targeted for deamination (e.g., off-target C residues that could potentially reside on ssDNA within the target nucleic acid locus) may be minimized. In addition, software tools can be used to optimize the gRNAs corresponding to a target nucleic acid sequence, e.g., to minimize total off-target activity across the genome. For example, for each possible targeting domain choice using S. pyogenes Cas9, all off-target sequences (preceding selected PAMs, e.g., NAG or NGG) may be identified across the genome that contain up to certain number (e.g., 1, 2, 3, 4, 5, 6, 7, 8, 9, or 10) of mismatched base-pairs. First regions of gRNAs complementary to a target site can be identified, and all first regions (e.g., crRNAs) can be ranked according to its total predicted off-target score; the top-ranked targeting domains represent those that are likely to have the greatest on-target and the least off-target activity. Candidate targeting gRNAs can be functionally evaluated by using methods known in the art and/or as set forth herein.

[0378] As a non-limiting example, target DNA hybridizing sequences in crRNAs of a guide RNA for use with Cas9s may be identified using a DNA sequence searching algorithm. gRNA design may be carried out using custom gRNA design software based on the public tool cas-offinder as described in Bae S., Park J., & Kim J.-S. Cas-OFFinder: A fast and versatile algorithm that searches for potential off-target sites of Cas9 RNA-guided endonucleases. Bioinformatics 30, 1473-1475 (2014). This software scores guides after calculating their genome-wide off-target propensity. Typically matches ranging from perfect matches to 7 mismatches are considered for guides ranging in length from 17 to 24. Once the off-target sites are computationally-determined, an aggregate score is calculated for each guide and summarized in a tabular output using a web-interface. In addition to identifying potential target sites adjacent to PAM sequences, the software also identifies all PAM adjacent sequences that differ by 1, 2, 3 or more than 3 nucleotides from the selected target sites. Genomic DNA sequences for a target nucleic acid sequence, e.g., a target gene may be obtained and repeat elements may be screened using publicly available tools, for example, the RepeatMasker program. RepeatMasker searches input DNA sequences for repeated elements and regions of low complexity. The output is a detailed annotation of the repeats present in a given query sequence.

[0379] Following identification, first regions of guide RNAs, e.g., crRNAs, may be ranked into tiers based on their distance to the target site, their orthogonality and presence of 5′ nucleotides for close matches with relevant PAM sequences (for example, a 5′ G based on identification of close matches in the human genome containing a relevant PAM e.g., NGG PAM for S. pyogenes, NNGRRT or NNGRRV PAM for S. aureus). As used herein, orthogonality refers to the number of sequences in the human genome that contain a minimum number of mismatches to the target sequence. A “high level of orthogonality” or “good orthogonality” may, for example, refer to 20-mer targeting domains that have no identical sequences in the human genome besides the intended target, nor any sequences that contain one or two mismatches in the target sequence. Targeting domains with good orthogonality may be selected to minimize off-target DNA cleavage.

[0380] In some embodiments, a reporter system may be used for detecting base-editing activity and testing candidate guide polynucleotides. In some embodiments, a reporter system may comprise a reporter gene based assay where base editing activity leads to expression of the reporter gene. For example, a reporter system may include a reporter gene comprising a deactivated start codon, e.g., a mutation on the template strand from 3′-TAC-S′ to 3′-CAC-S′. Upon successful deamination of the target C, the corresponding mRNA will be transcribed as 5′-AUG-3′ instead of 5′-GUG-3′, enabling the translation of the reporter gene. Suitable reporter genes will be apparent to those of skill in the art. Non-limiting examples of reporter genes include gene encoding green fluorescence protein (GFP), red fluorescence protein (RFP), luciferase, secreted alkaline phosphatase (SEAP), or any other gene whose expression are detectable and apparent to those skilled in the art. The reporter system can be used to test many different gRNAs, e.g., in order to determine which residue(s) with respect to the target DNA sequence the respective deaminase will target. sgRNAs that target non-template strand can also be tested in order to assess off-target effects of a specific base editing protein, e.g., a Cas9 deaminase fusion protein. In some embodiments, such gRNAs can be designed such that the mutated start codon will not be base-paired with the gRNA. The guide polynucleotides can comprise standard ribonucleotides, modified ribonucleotides (e.g., pseudouridine), ribonucleotide isomers, and/or ribonucleotide analogs. In some embodiments, the guide polynucleotide can comprise at least one detectable label. The detectable label can be a fluorophore (e.g., FAM, TMR, Cy3, Cy5, Texas Red, Oregon Green, Alexa Fluors, Halo tags, or suitable fluorescent dye), a detection tag (e.g., biotin, digoxigenin, and the like), quantum dots, or gold particles.

[0381] The guide polynucleotides can be synthesized chemically, synthesized enzymatically, or a combination thereof. For example, the guide RNA can be synthesized using standard phosphoramidite-based solid-phase synthesis methods. Alternatively, the guide RNA can be synthesized in vitro by operably linking DNA encoding the guide RNA to a promoter control sequence that is recognized by a phage RNA polymerase. Examples of suitable phage promoter sequences include T7, T3, SP6 promoter sequences, or variations thereof. In embodiments in which the guide RNA comprises two separate molecules (e.g., crRNA and tracrRNA), the crRNA can be chemically synthesized and the tracrRNA can be enzymatically synthesized.

[0382] In some embodiments, a base editor system may comprise multiple guide polynucleotides, e.g., gRNAs. For example, the gRNAs may target to one or more target loci (e.g., at least 1 gRNA, at least 2 gRNA, at least 5 gRNA, at least 10 gRNA, at least 20 gRNA, at least 30 g RNA, at least 50 gRNA) comprised in a base editor system. The multiple gRNA sequences can be tandemly arranged and are preferably separated by a direct repeat.

[0383] A DNA sequence encoding a guide RNA or a guide polynucleotide can also be part of a vector. Further, a vector can comprise additional expression control sequences (e.g., enhancer sequences, Kozak sequences, polyadenylation sequences, transcriptional termination sequences, etc.), selectable marker sequences (e.g., GFP or antibiotic resistance genes such as puromycin), origins of replication, and the like. A DNA molecule encoding a guide RNA can also be linear. A DNA molecule encoding a guide RNA or a guide polynucleotide can also be circular.

[0384] In some embodiments, one or more components of a base editor system may be encoded by DNA sequences. Such DNA sequences may be introduced into an expression system, e.g., a cell, together or separately. For example, DNA sequences encoding a polynucleotide programmable nucleotide binding domain and a guide RNA may be introduced into a cell, each DNA sequence can be part of a separate molecule (e.g., one vector containing the polynucleotide programmable nucleotide binding domain coding sequence and a second vector containing the guide RNA coding sequence) or both can be part of a same molecule (e.g., one vector containing coding (and regulatory) sequence for both the polynucleotide programmable nucleotide binding domain and the guide RNA).

[0385] A guide polynucleotide can comprise one or more modifications to provide a nucleic acid with a new or enhanced feature. A guide polynucleotide can comprise a nucleic acid affinity tag. A guide polynucleotide can comprise synthetic nucleotide, synthetic nucleotide analog, nucleotide derivatives, and/or modified nucleotides.

[0386] In some cases, a gRNA or a guide polynucleotide can comprise modifications. A modification can be made at any location of a gRNA or a guide polynucleotide. More than one modification can be made to a single gRNA or a guide polynucleotide. A gRNA or a guide polynucleotide can undergo quality control after a modification. In some cases, quality control can include PAGE, HPLC, MS, or any combination thereof.

[0387] A modification of a gRNA or a guide polynucleotide can be a substitution, insertion, deletion, chemical modification, physical modification, stabilization, purification, or any combination thereof.

[0388] A gRNA or a guide polynucleotide can also be modified by 5′ adenylate, 5′ guanosine-triphosphate cap, 5′N7-Methylguanosine-triphosphate cap, 5′ triphosphate cap, 3′ phosphate, 3′ thiophosphate, 5′ phosphate, 5′ thiophosphate, Cis-Syn thymidine dimer, trimers, C12 spacer, C3 spacer, C6 spacer, dSpacer, PC spacer, rSpacer, Spacer 18, Spacer 9,3′-3′ modifications, 5′-5′ modifications, abasic, acridine, azobenzene, biotin, biotin BB, biotin TEG, cholesteryl TEG, desthiobiotin TEG, DNP TEG, DNP-X, DOTA, dT-Biotin, dual biotin, PC biotin, psoralen C2, psoralen C6, TINA, 3′DABCYL, black hole quencher 1, black hole quencer 2, DABCYL SE, dT-DABCYL, IRDye QC-1, QSY-21, QSY-35, QSY-7, QSY-9, carboxyl linker, thiol linkers, 2′-deoxyribonucleoside analog purine, 2′-deoxyribonucleoside analog pyrimidine, ribonucleoside analog, 2′-O-methyl ribonucleoside analog, sugar modified analogs, wobble/universal bases, fluorescent dye label, 2′-fluoro RNA, 2′-O-methyl RNA, methylphosphonate, phosphodiester DNA, phosphodiester RNA, phosphothioate DNA, phosphorothioate RNA, UNA, pseudouridine-5′-triphosphate, 5′-methylcytidine-5′-triphosphate, or any combination thereof.

[0389] In some cases, a modification is permanent. In other cases, a modification is transient. In some cases, multiple modifications are made to a gRNA or a guide polynucleotide. A gRNA or a guide polynucleotide modification can alter physiochemical properties of a nucleotide, such as their conformation, polarity, hydrophobicity, chemical reactivity, base-pairing interactions, or any combination thereof.

[0390] A modification can also be a phosphorothioate substitute. In some cases, a natural phosphodiester bond can be susceptible to rapid degradation by cellular nucleases and; a modification of internucleotide linkage using phosphorothioate (PS) bond substitutes can be more stable towards hydrolysis by cellular degradation. A modification can increase stability in a gRNA or a guide polynucleotide. A modification can also enhance biological activity. In some cases, a phosphorothioate enhanced RNA gRNA can inhibit RNase A, RNase T1, calf serum nucleases, or any combinations thereof. These properties can allow the use of PS-RNA gRNAs to be used in applications where exposure to nucleases is of high probability in vivo or in vitro. For example, phosphorothioate (PS) bonds can be introduced between the last 3-5 nucleotides at the 5′- or “-end of a gRNA which can inhibit exonuclease degradation. In some cases, phosphorothioate bonds can be added throughout an entire gRNA to reduce attack by endonucleases.

### Protospacer Adjacent Motif

[0391] The term “protospacer adjacent motif (PAM)” or PAM-like motif refers to a 2-6 base pair DNA sequence immediately following the DNA sequence targeted by the Cas9 nuclease in the CRISPR bacterial adaptive immune system. In some embodiments, the PAM can be a 5′ PAM (i.e., located upstream of the 5′ end of the protospacer). In other embodiments, the PAM can be a 3′ PAM (i.e., located downstream of the 5′ end of the protospacer).

[0392] The PAM sequence is essential for target binding, but the exact sequence depends on a type of Cas protein. The PAM sequence can be any PAM sequence known in the art. Suitable PAM sequences include, but are not limited to, NGG, NGA, NGC, NGN, NGT, NGTT, NGCG, NGAG, NGAN, NGNG, NGCN, NGCG, NGTN, NNGRRT, NNNRRT, NNGRR(N), TTTV, TYCV, TYCV, TATV, NNNNGATT, NNAGAAW, or NAAAAC. Y is a pyrimidine; N is any nucleotide base; W is A or T.

[0393] A base editor provided herein can comprise a CRISPR protein-derived domain that is capable of binding a nucleotide sequence that contains a canonical or non-canonical protospacer adjacent motif (PAM) sequence. A PAM site is a nucleotide sequence in proximity to a target polynucleotide sequence. Some aspects of the disclosure provide for base editors comprising all or a portion of CRISPR proteins that have different PAM specificities. For example, typically Cas9 proteins, such as Cas9 from S. pyogenes (spCas9), require a canonical NGG PAM sequence to bind a particular nucleic acid region, where the “N” in “NGG” is adenine (A), thymine (T), guanine (G), or cytosine (C), and the G is guanine. A PAM can be CRISPR protein-specific and can be different between different base editors comprising different CRISPR protein-derived domains. A PAM can be 5′ or 3′ of a target sequence. A PAM can be upstream or downstream of a target sequence. A PAM can be 1, 2, 3, 4, 5, 6, 7, 8, 9, 10 or more nucleotides in length. Often, a PAM is between 2-6 nucleotides in length.

[0394] In some embodiments, the PAM is an “NRN” PAM where the “N” in “NRN” is adenine (A), thymine (T), guanine (G), or cytosine (C), and the R is adenine (A) or guanine (G); or the PAM is an “NYN” PAM, wherein the “N” in NYN is adenine (A), thymine (T), guanine (G), or cytosine (C), and the Y is cytidine (C) or thymine (T), for example, as described in R. T. Walton et al., 2020, Science, 10.1126/science.aba8853 (2020), the entire contents of which are incorporated herein by reference.

Several PAM variants are described in Table 1E

TABLE 1E
Cas9 proteins and corresponding PAM sequences

| Variant | PAM |
|---|---|
| spCas9 | NGG |
| spCas9-VRQR | NGA |
| spCas9-VRER | NGCG |
| SpCas9-MQKFRAER | NGC |
| xCas9 (sp) | NGN |
| saCas9 | NNGRRT |
| saCas9-KKH | NNNRRT |
| spCas9-MQKSER | NGCG |
| spCas9-MQKSER | NGCN |
| spCas9-LRKIQK | NGTN |
| spCas9-LRVSQK | NGTN |
| spCas9-LRVSQL | NGTN |
| SpyMacCas9 | NAA |
| Cpf1 | 5’ (TTTV) |

[0395] In some embodiments, the PAM is NGC. In some embodiments, the NGC PAM is recognized by a Cas9 variant, e.g., an SpCas9 variant. In some embodiments, the NGC PAM variant includes one or more amino acid substitutions selected from D1135M, S1136Q, G1218K, E1219F, A1322R, D1332A, R1335E, and T1337R (collectively termed “MQKFRAER”).

[0396] In some embodiments, the PAM is NGT. In some embodiments, the NGT PAM is recognized by a Cas9 variant. In some embodiments, the NGT PAM variant is generated through targeted mutations at one or more residues 1335, 1337, 1135, 1136, 1218, and/or 1219. In some embodiments, the NGT PAM variant is created through targeted mutations at one or more residues 1219, 1335, 1337, 1218. In some embodiments, the NGT PAM variant is created through targeted mutations at one or more residues 1135, 1136, 1218, 1219, and 1335. In some embodiments, the NGT PAM variant is selected from the set of targeted mutations provided in Tables 2 and 3 below.

TABLE 2
NGT PAM Variant Mutations at residues 1219, 1335, 1337, 1218

| Variant | E1219V | R1335Q | T1337 | G1218 |
|---|---|---|---|---|
| 1 | F | V | T | |
| 2 | F | V | R | |
| 3 | F | V | Q | |
| 4 | F | V | L | |
| 5 | F | V | T | R |
| 6 | F | V | R | R |
| 7 | F | V | Q | R |
| 8 | F | V | L | R |
| 9 | L | L | T | |
| 10 | L | L | R | |
| 11 | L | L | Q | |
| 12 | L | L | L | |
| 13 | F | I | T | |
| 14 | F | I | R | |
| 15 | F | I | Q | |
| 16 | F | I | L | |
| 17 | F | G | C | |
| 18 | H | L | N | |
| 19 | F | G | C | A |
| 20 | H | L | N | V |
| 21 | L | A | W | |
| 22 | L | A | F | |
| 23 | L | A | Y | |
| 24 | I | A | W | |
| 25 | I | A | F | |
| 26 | I | A | Y | |

TABLE 3
NGT PAM Variant Mutations at residues
1135, 1136, 1218, 1219, and 1335

| Variant | D1135L | S1136R | G1218S | E1219V | R1335Q |
|---|---|---|---|---|---|
| 27 | G | | | | |
| 28 | V | | | | |
| 29 | I | | | | |
| 30 | | A | | | |
| 31 | | W | | | |
| 32 | | H | | | |
| 33 | | K | | | |
| 34 | | | K | | |
| 35 | | | R | | |
| 36 | | | Q | | |
| 37 | | | T | | |
| 38 | | | N | | |
| 39 | | | | I | |
| 40 | | | | A | |
| 41 | | | | N | |
| 42 | | | | Q | |
| 43 | | | | G | |
| 44 | | | | L | |
| 45 | | | | S | |
| 46 | | | | T | |
| 47 | | | | | L |
| 48 | | | | | I |
| 49 | | | | | V |
| 50 | | | | | N |
| 51 | | | | | S |
| 52 | | | | | T |
| 53 | | | | | F |
| 54 | | | | | Y |
| 55 | N1286Q | I1331F | | | |

[0397] In some embodiments, the NGT PAM variant is selected from variant 5, 7, 28, 31, or 36 in Tables 2 and 3. In some embodiments, the variants have improved NGT PAM recognition.

[0398] In some embodiments, the NGT PAM variants have mutations at residues 1219, 1335, 1337, and/or 1218. In some embodiments, the NGT PAM variant is selected with mutations for improved recognition from the variants provided in Table 4 below.

TABLE 4
NGT PAM Variant Mutations at residues
1219, 1335, 1337, and 1218

| Variant | E1219V | R1335Q | T1337 | G1218 |
|---|---|---|---|---|
| 1 | F | V | T | |
| 2 | F | V | R | |
| 3 | F | V | Q | |
| 4 | F | V | L | |
| 5 | F | V | T | R |
| 6 | F | V | R | R |
| 7 | F | V | Q | R |
| 8 | F | V | L | R |

[0399] In some embodiments, the NGT PAM is selected from the variants provided in Table 5 below.

TABLE 5
NGT PAM variants

| | NGTN | | | | | | | |
|---|---|---|---|---|---|---|---|---|
| | variant | D1135 | S1136 | G1218 | E1219 | A1322R | R1335 | T1337 |
| Variant 1 | LRKIQK | L | R | K | I | — | Q | K |
| Variant 2 | LRSVQK | L | R | S | V | — | Q | K |
| Variant 3 | LRSVQL | L | R | S | V | — | Q | L |
| Variant 4 | LRKIRQK | L | R | K | I | R | Q | K |
| Variant 5 | LRSVRQK | L | R | S | V | R | Q | K |
| Variant 6 | LRSVRQL | L | R | S | V | R | Q | L |

[0400] In some embodiments the NGTN variant is variant 1. In some embodiments, the NGTN variant is variant 2. In some embodiments, the NGTN variant is variant 3. In some embodiments, the NGTN variant is variant 4. In some embodiments, the NGTN variant is variant 5. In some embodiments, the NGTN variant is variant 6.

[0401] In some embodiments, the Cas9 domain is a Cas9 domain from Streptococcus pyogenes (SpCas9). In some embodiments, the SpCas9 domain is a nuclease active SpCas9, a nuclease inactive SpCas9 (SpCas9d), or a SpCas9 nickase (SpCas9n). In some embodiments, the SpCas9 comprises a D9X mutation, or a corresponding mutation in any of the amino acid sequences provided herein, wherein X is any amino acid except for D. In some embodiments, the SpCas9 comprises a D9A mutation, or a corresponding mutation in any of the amino acid sequences provided herein. In some embodiments, the SpCas9 domain, the SpCas9d domain, or the SpCas9n domain can bind to a nucleic acid sequence having a non-canonical PAM. In some embodiments, the SpCas9 domain, the SpCas9d domain, or the SpCas9n domain can bind to a nucleic acid sequence having an NGG, a NGA, or a NGCG PAM sequence.

[0402] In some embodiments, the SpCas9 domain comprises one or more of a D1135X, a R1335X, and a T1337X mutation, or a corresponding mutation in any of the amino acid sequences provided herein, wherein X is any amino acid. In some embodiments, the SpCas9 domain comprises one or more of a D1135E, R1335Q, and T1337R mutation, or a corresponding mutation in any of the amino acid sequences provided herein. In some embodiments, the SpCas9 domain comprises a D1135E, a R1335Q, and a T1337R mutation, or corresponding mutations in any of the amino acid sequences provided herein. In some embodiments, the SpCas9 domain comprises one or more of a D1135X, a R1335X, and a T1337X mutation, or a corresponding mutation in any of the amino acid sequences provided herein, wherein X is any amino acid. In some embodiments, the SpCas9 domain comprises one or more of a D1135V, a R1335Q, and a T1337R mutation, or a corresponding mutation in any of the amino acid sequences provided herein. In some embodiments, the SpCas9 domain comprises a D1135V, a R1335Q, and a T1337R mutation, or corresponding mutations in any of the amino acid sequences provided herein. In some embodiments, the SpCas9 domain comprises one or more of a D1135X, a G1218X, a R1335X, and a T1337X mutation, or a corresponding mutation in any of the amino acid sequences provided herein, wherein X is any amino acid. In some embodiments, the SpCas9 domain comprises one or more of a D1135V, a G1218R, a R1335Q, and a T1337R mutation, or a corresponding mutation in any of the amino acid sequences provided herein. In some embodiments, the SpCas9 domain comprises a D1135V, a G1218R, a R1335Q, and a T1337R mutation, or corresponding mutations in any of the amino acid sequences provided herein.

[0403] In some embodiments, the Cas9 domains of any of the fusion proteins provided herein comprises an amino acid sequence that is at least 60%, at least 65%, at least 70%, at least 75%, at least 80%, at least 85%, at least 90%, at least 95%, at least 96%, at least 97%, at least 98%, at least 99%, or at least 99.5% identical to a Cas9 polypeptide described herein. In some embodiments, the Cas9 domains of any of the fusion proteins provided herein comprises the amino acid sequence of any Cas9 polypeptide described herein. In some embodiments, the Cas9 domains of any of the fusion proteins provided herein consists of the amino acid sequence of any Cas9 polypeptide described herein.

[0404] In some examples, a PAM recognized by a CRISPR protein-derived domain of a base editor disclosed herein can be provided to a cell on a separate oligonucleotide to an insert (e.g., an AAV insert) encoding the base editor. In such embodiments, providing PAM on a separate oligonucleotide can allow cleavage of a target sequence that otherwise would not be able to be cleaved, because no adjacent PAM is present on the same polynucleotide as the target sequence.

[0405] In an embodiment, S. pyogenes Cas9 (SpCas9) can be used as a CRISPR endonuclease for genome engineering. However, others can be used. In some embodiments, a different endonuclease can be used to target certain genomic targets. In some embodiments, synthetic SpCas9-derived variants with non-NGG PAM sequences can be used. Additionally, other Cas9 orthologues from various species have been identified and these “non-SpCas9s” can bind a variety of PAM sequences that can also be useful for the present disclosure. For example, the relatively large size of SpCas9 (approximately 4 kb coding sequence) can lead to plasmids carrying the SpCas9 cDNA that cannot be efficiently expressed in a cell. Conversely, the coding sequence for Staphylococcus aureus Cas9 (SaCas9) is approximately 1 kilobase shorter than SpCas9, possibly allowing it to be efficiently expressed in a cell. Similar to SpCas9, the SaCas9 endonuclease is capable of modifying target genes in mammalian cells in vitro and in mice in vivo. In some embodiments, a Cas protein can target a different PAM sequence. In some embodiments, a target gene can be adjacent to a Cas9 PAM, 5′-NGG, for example. In other embodiments, other Cas9 orthologs can have different PAM requirements. For example, other PAMs such as those of S. thermophilus (5′-NNAGAA for CRISPR1 and 5′-NGGNG for CRISPR3) and Neisseria meningitidis (5′-NNNNGATT) can also be found adjacent to a target gene.

[0406] In some embodiments, for a S. pyogenes system, a target gene sequence can precede (i.e., be 5′ to) a 5′-NGG PAM, and a 20-nt guide RNA sequence can base pair with an opposite strand to mediate a Cas9 cleavage adjacent to a PAM. In some embodiments, an adjacent cut can be or can be about 3 base pairs upstream of a PAM. In some embodiments, an adjacent cut can be or can be about 10 base pairs upstream of a PAM. In some embodiments, an adjacent cut can be or can be about 0-20 base pairs upstream of a PAM. For example, an adjacent cut can be next to, 1, 2, 3, 4, 5, 6, 7, 8, 9, 10, 11, 12, 13, 14, 15, 16, 17, 18, 19, 20, 21, 22, 23, 24, 25, 26, 27, 28, 29, or 30 base pairs upstream of a PAM. An adjacent cut can also be downstream of a PAM by 1 to 30 base pairs. The sequences of exemplary SpCas9 proteins capable of binding a PAM sequence follow:

[0407] The amino acid sequence of an exemplary PAM-binding SpCas9 is as follows:

MDKKYSIGLDIGTNSVGWAVITDEYKVPSKKFKVLGNTDRHSIKKNLIGALLFDSGETAEAT
RLKRTARRRYTRRKNRICYLQEIFSNEMAKVDDSFFHRLEESFLVEEDKKHERHPIFGNIVD
EVAYHEKYPTIYHLRKKLVDSTDKADLRLIYLALAHMIKFRGHFLIEGDLNPDNSDVDKLFI
QLVQTYNQLFEENPINASGVDAKAILSARLSKSRRLENLIAQLPGEKKNGLFGNLIALSLGL
TPNFKSNFDLAEDAKLQLSKDTYDDDLDNLLAQIGDQYADLFLAAKNLSDAILLSDILRVNT
EITKAPLSASMIKRYDEHHQDLTLLKALVRQQLPEKYKEIFFDQSKNGYAGYIDGGASQEEF
YKFIKPILEKMDGTEELLVKLNREDLLRKQRTFDNGSIPHQIHLGELHAILRRQEDFYPFLK
DNREKIEKILTFRIPYYVGPLARGNSRFAWMTRKSEETITPWNFEEVVDKGASAQSFIERMT
NFDKNLPNEKVLPKHSLLYEYFTVYNELTKVKYVTEGMRKPAFLSGEQKKAIVDLLFKTNRK
VTVKQLKEDYFKKIECFDSVEISGVEDRFNASLGTYHDLLKIIKDKDFLDNEENEDILEDIV
LTLTLFEDREMIEERLKTYAHLFDDKVMKQLKRRRYTGWGRLSRKLINGIRDKQSGKTILDF
LKSDGFANRNFMQLIHDDSLTFKEDIQKAQVSGQGDSLHEHIANLAGSPAIKKGILQTVKVV
DELVKVMGRHKPENIVIEMARENQTTQKGQKNSRERMKRIEEGIKELGSQILKEHPVENTQL
QNEKLYLYYLQNGRDMYVDQELDINRLSDYDVDHIVPQSFLKDDSIDNKVLTRSDKNRGKSD
NVPSEEVVKKMKNYWRQLLNAKLITQRKFDNLTKAERGGLSELDKAGFIKRQLVETRQITKH
VAQILDSRMNTKYDENDKLIREVKVITLKSKLVSDFRKDFQFYKVREINNYHHAHDAYLNAV
VGTALIKKYPKLESEFVYGDYKVYDVRKMIAKSEQEIGKATAKYFFYSNIMNFFKTEITLAN
GEIRKRPLIETNGETGEIVWDKGRDFATVRKVLSMPQVNIVKKTEVQTGGFSKESILPKRNS
DKLIARKKDWDPKKYGGFDSPTVAYSVLVVAKVEKGKSKKLKSVKELLGITIMERSSFEKNP
IDFLEAKGYKEVKKDLIIKLPKYSLFELENGRKRMLASAGELQKGNELALPSKYVNFLYLAS
HYEKLKGSPEDNEQKQLFVEQHKHYLDEIIEQISEFSKRVILADANLDKVLSAYNKHRDKPI
REQAENIIHLFTLTNLGAPAAFKYFDTTIDRKRYTSTKEVLDATLIHQSITGLYETRIDLSQ
LGGD.

[0408] The amino acid sequence of an exemplary PAM-binding SpCas9n is as follows:

MDKKYSIGLAIGTNSVGWAVITDEYKVPSKKFKVLGNTDRHSIKKNLIGALLFDSGETAEAT
RLKRTARRRYTRRKNRICYLQEIFSNEMAKVDDSFFHRLEESFLVEEDKKHERHPIFGNIVD
EVAYHEKYPTIYHLRKKLVDSTDKADLRLIYLALAHMIKFRGHFLIEGDLNPDNSDVDKLFI
QLVQTYNQLFEENPINASGVDAKAILSARLSKSRRLENLIAQLPGEKKNGLFGNLIALSLGL
TPNFKSNFDLAEDAKLQLSKDTYDDDLDNLLAQIGDQYADLFLAAKNLSDAILLSDILRVNT
EITKAPLSASMIKRYDEHHQDLTLLKALVRQQLPEKYKEIFFDQSKNGYAGYIDGGASQEEF
YKFIKPILEKMDGTEELLVKLNREDLLRKQRTFDNGSIPHQIHLGELHAILRRQEDFYPFLK
DNREKIEKILTFRIPYYVGPLARGNSRFAWMTRKSEETITPWNFEEVVDKGASAQSFIERMT
NFDKNLPNEKVLPKHSLLYEYFTVYNELTKVKYVTEGMRKPAFLSGEQKKAIVDLLFKTNRK
VTVKQLKEDYFKKIECFDSVEISGVEDRFNASLGTYHDLLKIIKDKDFLDNEENEDILEDIV
LTLTLFEDREMIEERLKTYAHLFDDKVMKQLKRRRYTGWGRLSRKLINGIRDKQSGKTILDF
LKSDGFANRNFMQLIHDDSLTFKEDIQKAQVSGQGDSLHEHIANLAGSPAIKKGILQTVKVV
DELVKVMGRHKPENIVIEMARENQTTQKGQKNSRERMKRIEEGIKELGSQILKEHPVENTQL
QNEKLYLYYLQNGRDMYVDQELDINRLSDYDVDHIVPQSFLKDDSIDNKVLTRSDKNRGKSD
NVPSEEVVKKMKNYWRQLLNAKLITQRKFDNLTKAERGGLSELDKAGFIKRQLVETRQITKH
VAQILDSRMNTKYDENDKLIREVKVITLKSKLVSDFRKDFQFYKVREINNYHHAHDAYLNAV
VGTALIKKYPKLESEFVYGDYKVYDVRKMIAKSEQEIGKATAKYFFYSNIMNFFKTEITLAN
GEIRKRPLIETNGETGEIVWDKGRDFATVRKVLSMPQVNIVKKTEVQTGGFSKESILPKRNS
DKLIARKKDWDPKKYGGFDSPTVAYSVLVVAKVEKGKSKKLKSVKELLGITIMERSSFEKNP
IDFLEAKGYKEVKKDLIIKLPKYSLFELENGRKRMLASAGELQKGNELALPSKYVNFLYLAS
HYEKLKGSPEDNEQKQLFVEQHKHYLDEIIEQISEFSKRVILADANLDKVLSAYNKHRDKPI
REQAENIIHLFTLTNLGAPAAFKYFDTTIDRKRYTSTKEVLDATLIHQSITGLYETRIDLSQ
LGGD.

[0409] The amino acid sequence of an exemplary PAM-binding SpEQR Cas9 is as follows:

MDKKYSIGLAIGTNSVGWAVITDEYKVPSKKFKVLGNTDRHSIKKNLIGALLFDSGETAEAT RLKRTARRRYTRRKNRICYLQEIFSNEMAKVDDSFFHRLEESFVEEDKKHERHPIFGNIVDE VAYHEKYPTIYHLRKKLVDSTDKADLRLIYLALAHMIKFRGHFLIEGDLNPDNSDVDKLFIQ LVQTYNQLFEENPINASGVDAKAILSARLSKSRRLENLIAQLPGEKKNGLFGNLIALSLGLT PNFKSNFDLAEDAKLQLSKDTYDDDLDNLLAQIGDQYADLFLAAKNLSDAILLSDILRVNTE ITKAPLSASMIKRYDEHHQDLTLLKALVRQQLPEKYKEIFFDQSKNGYAGYIDGGASQEEFY KFIKPILEKMDGTEELLVKLNREDLLRKQRTFDNGSIPHQIHLGELHAILRRQEDFYPFLKD NREKIEKILTFRIPYYVGPLARGNSRFAWMTRKSEETITPWNFEEVVDKGASAQSFIERMTN FDKNLPNEKVLPKHSLLYEYFTVYNELTKVKYVTEGMRKPAFLSGEQKKAIVDLLFKTNRKV TVKQLKEDYFKKIECFDSVEISGVEDRFNASLGTYHDLLKIIKDKDFLDNEENEDILEDIVL TLTLFEDREMIEERLKTYAHLFDDKVMKQLKRRRYTGWGRLSRKLINGIRDKQSGKTILDFL KSDGFANRNFMQLIHDDSLTFKEDIQKAQVSGQGDSLHEHIANLAGSPAIKKGILQTVKVVD ELVKVMGRHKPENIVIEMARENQTTQKGQKNSRERMKRIEEGIKELGSQILKEHPVENTQLQ NEKLYLYYLQNGRDMYVDQELDINRLSDYDVDHIVPQSFLKDDSIDNKVLTRSDKNRGKSDN VPSEEVVKKMKNYWRQLLNAKLITQRKFDNLTKAERGGLSELDKAGFIKRQLVETRQITKHV AQILDSRMNTKYDENDKLIREVKVITLKSKLVSDFRKDFQFYKVREINNYHHAHDAYLNAVV GTALIKKYPKLESEFVYGDYKVYDVRKMIAKSEQEIGKATAKYFFYSNIMNFFKTEITLANG EIRKRPLIETNGETGEIVWDKGRDFATVRKVLSMPQVNIVKKTEVQTGGFSKESILPKRNSD KLIARKKDWDPKKYGGFESPTVAYSVLVVAKVEKGKSKKLKSVKELLGITIMERSSFEKNPI DFLEAKGYKEVKKDLIIKLPKYSLFELENGRKRMLASAGELQKGNELALPSKYVNFLYLASH YEKLKGSPEDNEQKQLFVEQHKHYLDEIIEQISEFSKRVILADANLDKVLSAYNKHRDKPIR EQAENIIHLFTLTNLGAPAAFKYFDTTIDRKQYRSTKEVLDATLIHQSITGLYETRIDLSQL GGD. In this sequence, residues E1135, Q1335 and R1337, which can be mutated from D1135, R1335, and T1337 to yield a SpEQR Cas9, are underlined and in bold.

[0410] The amino acid sequence of an exemplary PAM-binding SpVQR Cas9 is as follows:

MDKKYSIGLAIGTNSVGWAVITDEYKVPSKKFKVLGNTDRHSIKKNLIGALLFDSGETAEAT RLKRTARRRYTRRKNRICYLQEIFSNEMAKVDDSFFHRLEESFLVEEDKKHERHPIFGNIVD EVAYHEKYPTIYHLRKKLVDSTDKADLRLIYLALAHMIKFRGHFLIEGDLNPDNSDVDKLFI QLVQTYNQLFEENPINASGVDAKAILSARLSKSRRLENLIAQLPGEKKNGLFGNLIALSLGL TPNFKSNFDLAEDAKLQLSKDTYDDDLDNLLAQIGDQYADLFLAAKNLSDAILLSDILRVNT EITKAPLSASMIKRYDEHHQDLTLLKALVRQQLPEKYKEIFFDQSKNGYAGYIDGGASQEEF YKFIKPILEKMDGTEELLVKLNREDLLRKQRTFDNGSIPHQIHLGELHAILRRQEDFYPFLK DNREKIEKILTFRIPYYVGPLARGNSRFAWMTRKSEETITPWNFEEVVDKGASAQSFIERMT NFDKNLPNEKVLPKHSLLYEYFTVYNELTKVKYVTEGMRKPAFLSGEQKKAIVDLLFKTNRK VTVKQLKEDYFKKIECFDSVEISGVEDRFNASLGTYHDLLKIIKDKDFLDNEENEDILEDIV LTLTLFEDREMIEERLKTYAHLFDDKVMKQLKRRRYTGWGRLSRKLINGIRDKQSGKTILDF LKSDGFANRNFMQLIHDDSLTFKEDIQKAQVSGQGDSLHEHIANLAGSPAIKKGILQTVKVV DELVKVMGRHKPENIVIEMARENQTTQKGQKNSRERMKRIEEGIKELGSQILKEHPVENTQL QNEKLYLYYLQNGRDMYVDQELDINRLSDYDVDHIVPQSFLKDDSIDNKVLTRSDKNRGKSD NVPSEEVVKKMKNYWRQLLNAKLITQRKFDNLIKAERGGLSELDKAGFIKRQLVETRQIIKH VAQILDSRMNTKYDENDKLIREVKVITLKSKLVSDFRKDFQFYKVREINNYHHAHDAYLNAV VGTALIKKYPKLESEFVYGDYKVYDVRKMIAKSEQEIGKATAKYFFYSNIMNFFKTEITLAN GEIRKRPLIETNGETGEIVWDKGRDFATVRKVLSMPQVNIVKKTEVQTGGFSKESILPKRNS DKLIARKKDWDPKKYGGFVSPTVAYSVLVVAKVEKGKSKKLKSVKELLGITIMERSSFEKNP IDFLEAKGYKEVKKDLIIKLPKYSLFELENGRKRMLASAGELQKGNELALPSKYVNFLYLAS HYEKLKGSPEDNEQKQLFVEQHKHYLDEIIEQISEFSKRVILADANLDKVLSAYNKHRDKPI REQAENIIHLFTLINLGAPAAFKYFDTTIDRKQYRSTKEVLDAILIHQSITGLYETRIDLSQ LGGD. In this sequence, residues V1135, Q1335, and R1337, which can be mutated from D1135, R1335, and T1337 to yield a SpVQR Cas9, are underlined and in bold.

[0411] The amino acid sequence of an exemplary PAM-binding SpVRER Cas9 is as follows:

MDKKYSIGLAIGTNSVGWAVITDEYKVPSKKFKVLGNTDRHSIKKNLIGALLFDSGETAEAT RLKRTARRRYTRRKNRICYLQEIFSNEMAKVDDSFFHRLEESFLVEEDKKHERHPIFGNIVD EVAYHEKYPTIYHLRKKLVDSTDKADLRLIYLALAHMIKFRGHFLIEGDLNPDNSDVDKLFI QLVQTYNQLFEENPINASGVDAKAILSARLSKSRRLENLIAQLPGEKKNGLFGNLIALSLGL TPNFKSNFDLAEDAKLQLSKDTYDDDLDNLLAQIGDQYADLFLAAKNLSDAILLSDILRVNT EITKAPLSASMIKRYDEHHQDLTLLKALVRQQLPEKYKEIFFDQSKNGYAGYIDGGASQEEF YKFIKPILEKMDGTEELLVKLNREDLLRKQRTFDNGSIPHQIHLGELHAILRRQEDFYPFLK DNREKIEKILTFRIPYYVGPLARGNSRFAWMTRKSEETITPWNFEEVVDKGASAQSFIERMT NFDKNLPNEKVLPKHSLLYEYFTVYNELTKVKYVTEGMRKPAFLSGEQKKAIVDLLFKTNRK VTVKQLKEDYFKKIECFDSVEISGVEDRFNASLGTYHDLLKIIKDKDFLDNEENEDILEDIV LTLTLFEDREMIEERLKTYAHLFDDKVMKQLKRRRYTGWGRLSRKLINGIRDKQSGKTILDF LKSDGFANRNFMQLIHDDSLTFKEDIQKAQVSGQGDSLHEHIANLAGSPAIKKGILQTVKVV DELVKVMGRHKPENIVIEMARENQTTQKGQKNSRERMKRIEEGIKELGSQILKEHPVENTQL QNEKLYLYYLQNGRDMYVDQELDINRLSDYDVDHIVPQSFLKDDSIDNKVLTRSDKNRGKSD NVPSEEVVKKMKNYWRQLLNAKLITQRKFDNLIKAERGGLSELDKAGFIKRQLVETRQIIKH VAQILDSRMNTKYDENDKLIREVKVITLKSKLVSDFRKDFQFYKVREINNYHHAHDAYLNAV VGTALIKKYPKLESEFVYGDYKVYDVRKMIAKSEQEIGKATAKYFFYSNIMNFFKTEITLAN GEIRKRPLIETNGETGEIVWDKGRDFATVRKVLSMPQVNIVKKTEVQTGGFSKESILPKRNS DKLIARKKDWDPKKYGGFVSPTVAYSVLVVAKVEKGKSKKLKSVKELLGITIMERSSFEKNP IDFLEAKGYKEVKKDLIIKLPKYSLFELENGRKRMLASARELQKGNELALPSKYVNFLYLAS HYEKLKGSPEDNEQKQLFVEQHKHYLDEIIEQISEFSKRVILADANLDKVLSAYNKHRDKPI REQAENIIHLFTLINLGAPAAFKYFDTTIDRKEYRSTKEVLDAILIHQSITGLYETRIDLSQ LGGD. In the above sequence, residues V1135, R1218, Q1335, and R1337, which can be mutated from D1134, G1218, R1335, and T1337 to yield a SpVRER Cas9, are underlined and in bold.

[0412] In some embodiments, engineered SpCas9 variants are capable of recognizing protospacer adjacent motif (PAM) sequences flanked by a 3′ H (non-G PAM) (see Tables 1A-1E). In some embodiments, the SpCas9 variants recognize NRNH PAMs (where R is A or G and H is A, C or T). In some embodiments, the non-G PAM is NRRH, NRTH, or NRCH (see e.g., Miller, S. M., et al. Continuous evolution of SpCas9 variants compatible with non-G PAMs, Nat. Biotechnol. (2020), the contents of which is incorporated herein by reference in its entirety).

[0413] In some embodiments, the Cas9 domain is a recombinant Cas9 domain. In some embodiments, the recombinant Cas9 domain is a SpyMacCas9 domain. In some embodiments, the SpyMacCas9 domain is a nuclease active SpyMacCas9, a nuclease inactive SpyMacCas9 (SpyMacCas9d), or a SpyMacCas9 nickase (SpyMacCas9n). In some embodiments, the SaCas9 domain, the SaCas9d domain, or the SaCas9n domain can bind to a nucleic acid sequence having a non-canonical PAM. In some embodiments, the SpyMacCas9 domain, the SpCas9d domain, or the SpCas9n domain can bind to a nucleic acid sequence having a NAA PAM sequence.

[0414] The sequence of an exemplary Cas9 A homolog of Spy Cas9 in Streptococcus macacae with native 5′-NAAN-3′ PAM specificity is known in the art and described, for example, by Jakimo et al., (www.biorxiv.org/content/biorxiv/early/2018/09/27/429654.full.pdf), and is provided below.

### SpyMacCas9

MDKKYSIGLDIGTNSVGWAVITDDYKVPSKKFKVLGNTDRHSIKKNLIGALLFGSGETAEAT
RLKRTARRRYTRRKNRICYLQEIFSNEMAKVDDSFFHRLEESFLVEEDKKHERHPIFGNIVD
EVAYHEKYPTIYHLRKKLADSTDKADLRLIYLALAHMIKFRGHFLIEGDLNPDNSDVDKLFI
QLVQIYNQLFEENPINASRVDAKAILSARLSKSRRLENLIAQLPGEKRNGLFGNLIALSLGL
TPNFKSNFDLAEDAKLQLSKDTYDDDLDNLLAQIGDQYADLFLAAKNLSDAILLSDILRVNS
EITKAPLSASMIKRYDEHHQDLTLLKALVRQQLPEKYKEIFFDQSKNGYAGYIDGGASQEEF
YKFIKPILEKMDGTEELLVKLNREDLLRKQRTFDNGSIPHQIHLGELHAILRRQEDFYPFLK
DNREKIEKILTFRIPYYVGPLARGNSRFAWMTRKSEETITPWNFEEVVDKGASAQSFIERMT
NFDKNLPNEKVLPKHSLLYEYFTVYNELTKVKYVTEGMRKPAFLSGEQKKAIVDLLFKTNRK
VTVKQLKEDYFKKIECFDSVEISGVEDRFNASLGAYHDLLKIIKDKDFLDNEENEDILEDIV
LTLTLFEDRGMIEERLKTYAHLFDDKVMKQLKRRRYTGWGRLSRKLINGIRDKQSGKTILDF
LKSDGFANRNFMQLIHDDSLTFKEDIQKAQVSGQGHSLHEQIANLAGSPAIKKGILQTVKIV
DELVKVMGHKPENIVIEMARENQTTQKGQKNSRERMKRIEEGIKELGSQILKEHPVENTQLQ
NEKLYLYYLQNGRDMYVDQELDINRLSDYDVDHIVPQSFIKDDSIDNKVLTRSDKNRGKSDN
VPSEEVVKKMKNYWRQLLNAKLITQRKFDNLTKAERGGLSELDKAGFIKRQLVETRQITKHV
AQILDSRMNTKYDENDKLIREVKVITLKSKLVSDFRKDFQFYKVREINNYHHAHDAYLNAVV
GTALIKKYPKLESEFVYGDYKVYDVRKMIAKSEQEIGKATAKYFFYSNIMNFFKTEITLANG
EIRKRPLIETNGETGEIVWDKGRDFATVRKVLSMPQVNIVKKTEIQTVGQNGGLFDDNPKSP
LEVTPSKLVPLKKELNPKKYGGYQKPTTAYPVLLITDTKQLIPISVMNKKQFEQNPVKFLRD
RGYQQVGKNDFIKLPKYTLVDIGDGIKRLWASSKEIHKGNQLVVSKKSQILLYHAHHLDSDL
SNDYLQNHNQQFDVLFNEIISFSKKCKLGKEHIQKIENVYSNKKNSASIEELAESFIKLLGF
TQLGATSPFNFLGVKLNQKQYKGKKDYILPCTEGTLIRQSITGLYETRVDLSKIGED.

[0416] In some cases, a variant Cas9 protein harbors, H840A, P475A, W476A, N477A, D1125A, W1126A, and D1218A mutations such that the polypeptide has a reduced ability to cleave a target DNA or RNA. Such a Cas9 protein has a reduced ability to cleave a target DNA (e.g., a single stranded target DNA) but retains the ability to bind a target DNA (e.g., a single stranded target DNA). As another non-limiting example, in some cases, the variant Cas9 protein harbors D10A, H840A, P475A, W476A, N477A, D1125A, W1126A, and D1218A mutations such that the polypeptide has a reduced ability to cleave a target DNA. Such a Cas9 protein has a reduced ability to cleave a target DNA (e.g., a single stranded target DNA) but retains the ability to bind a target DNA (e.g., a single stranded target DNA). In some cases, when a variant Cas9 protein harbors W476A and W1126A mutations or when the variant Cas9 protein harbors P475A, W476A, N477A, D1125A, W1126A, and D1218A mutations, the variant Cas9 protein does not bind efficiently to a PAM sequence. Thus, in some such cases, when such a variant Cas9 protein is used in a method of binding, the method does not require a PAM sequence. In other words, in some cases, when such a variant Cas9 protein is used in a method of binding, the method can include a guide RNA, but the method can be performed in the absence of a PAM sequence (and the specificity of binding is therefore provided by the targeting segment of the guide RNA). Other residues can be mutated to achieve the above effects (i.e., inactivate one or the other nuclease portions). As non-limiting examples, residues D10, G12, G17, E762, H840, N854, N863, H982, H983, A984, D986, and/or A987 can be altered (i.e., substituted). Also, mutations other than alanine substitutions are suitable.

[0417] In some embodiments, a CRISPR protein-derived domain of a base editor can comprise all or a portion of a Cas9 protein with a canonical PAM sequence (NGG). In other embodiments, a Cas9-derived domain of a base editor can employ a non-canonical PAM sequence. Such sequences have been described in the art and would be apparent to the skilled artisan. For example, Cas9 domains that bind non-canonical PAM sequences have been described in Kleinstiver, B. P., et al., “Engineered CRISPR-Cas9 nucleases with altered PAM specificities” Nature 523, 481-485 (2015); and Kleinstiver, B. P., et al., “Broadening the targeting range of Staphylococcus aureus CRISPR-Cas9 by modifying PAM recognition” Nature Biotechnology 33, 1293-1298 (2015); R. T. Walton et al. “Unconstrained genome targeting with near-PAMless engineered CRISPR-Cas9 variants” Science 10.1126/science.aba8853 (2020); Hu et al. “Evolved Cas9 variants with broad PAM compatibility and high DNA specificity,” Nature, 2018 Apr. 5, 556(7699), 57-63; S. Miller et al., “Continuous evolution of SpCas9 variants compatible with non-G PAMs” Nat. Biotechnol., 2020 April; 38(4):471-481; the entire contents of each are hereby incorporated by reference. By way of example, S. Miller et al. (2020, Id.) describes SpCas9 variants that collectively recognize Non-G PAMs, such sa NRNH PAMs (where R is A or G and H is A, C or T).

Fusion Proteins Comprising a Cas9 Domain and a Cytidine Deaminase and/or Adenosine Deaminase

[0418] Some aspects of the disclosure provide fusion proteins comprising a Cas9 domain or other nucleic acid programmable DNA binding protein and one or more adenosine deaminase domain, cytidine deaminase domain, and/or DNA glycosylase domains. It should be appreciated that the Cas9 domain may be any of the Cas9 domains or Cas9 proteins (e.g., dCas9 or nCas9) provided herein. In some embodiments, any of the Cas9 domains or Cas9 proteins (e.g., dCas9 or nCas9) provided herein may be fused with any of the adenosine deaminases and cytidine deaminases described herein. The domains of the base editors disclosed herein can be arranged in any order.

[0419] In some embodiments, the fusion protein comprises the following domains A-C, A-D, or A-E:
[0420] NH₂-[A-B-C]-COOH;
[0421] NH₂-[A-B-C-D]-COOH; or
[0422] NH₂-[A-B-C-D-E]-COOH;
   wherein A and C or A, C, and E, each comprises one or more of the following:

[0423] an adenosine deaminase domain or an active fragment thereof,

[0424] a cytidine deaminase domain or an active fragment thereof,

[0425] a DNA glycosylase domain or an active fragment thereof; and

[0426] wherein B or B and D, each comprises one or more domains having nucleic acid sequence specific binding activity.

[0427] In some embodiments, the fusion protein comprises the following structure:
[0428] NH₂-[Aₙ-Bₒ-Cₙ]—COOH;
[0429] NH₂-[Aₙ-Bₒ-Cₙ-Dₒ]-COOH; or
[0430] NH₂-[Aₙ-Bₒ-Cₚ-Dₒ-E_{q}]-COOH;
   wherein A and C or A, C, and E, each comprises one or more of the following:

[0431] an adenosine deaminase domain or an active fragment thereof,

[0432] a cytidine deaminase domain or an active fragment thereof,

[0433] a DNA glycosylase domain or an active fragment thereof; and

wherein n is an integer: 1, 2, 3, 4, or 5, wherein p is an integer: 0, 1, 2, 3, 4, or 5; wherein q is an integer 0, 1, 2, 3, 4, or 5; and wherein B or B and D each comprises a domain having nucleic acid sequence specific binding activity; and wherein o is an integer: 1, 2, 3, 4, or 5.

[0434] For example, and without limitation, in some embodiments, the fusion protein comprises the structure:
[0435] NH₂-[adenosine deaminase]-[Cas9 domain]-COOH;
[0436] NH₂-[Cas9 domain]-[adenosine deaminase]-COOH;
[0437] NH₂-[cytidine deaminase]-[Cas9 domain]-COOH;
[0438] NH₂-[Cas9 domain]-[cytidine deaminase]-COOH;
[0439] NH₂-[cytidine deaminase]-[Cas9 domain]-[adenosine deaminase]-COOH;
[0440] NH₂-[adenosine deaminase]-[Cas9 domain]-[cytidine deaminase]-COOH;
[0441] NH₂-[adenosine deaminase]-[cytidine deaminase]-[Cas9 domain]-COOH;
[0442] NH₂-[cytidine deaminase]-[adenosine deaminase]-[Cas9 domain]-COOH;
[0443] NH₂-[Cas9 domain]-[adenosine deaminase]-[cytidine deaminase]-COOH; or
[0444] NH₂-[Cas9 domain]-[cytidine deaminase]-[adenosine deaminase]-COOH.

[0445] In some embodiments, any of the Cas12 domains or Cas12 proteins provided herein may be fused with any of the cytidine or adenosine deaminases provided herein. For example, and without limitation, in some embodiments, the fusion protein comprises the structure:
[0446] NH₂-[adenosine deaminase]-[Cas12 domain]-COOH;
[0447] NH₂-[Cas12 domain]-[adenosine deaminase]-COOH;
[0448] NH₂-[cytidine deaminase]-[Cas12 domain]-COOH;
[0449] NH₂-[Cas12 domain]-[cytidine deaminase]-COOH;
[0450] NH₂-[cytidine deaminase]-[Cas12 domain]-[adenosine deaminase]-COOH;
[0451] NH₂-[adenosine deaminase]-[Cas12 domain]-[cytidine deaminase]-COOH;
   NH₂-[adenosine deaminase]-[cytidine deaminase]-[Cas12 domain]-COOH;
   NH₂-[cytidine deaminase]-[adenosine deaminase]-[Cas12 domain]-COOH;
   NH₂-[Cas12 domain]-[adenosine deaminase]-[cytidine deaminase]-COOH; or
   NH₂-[Cas12 domain]-[cytidine deaminase]-[adenosine deaminase]-COOH.

[0452] In some embodiments, the adenosine deaminase of the fusion protein comprises a TadA*8 and a cytidine deaminase. In some embodiments, the TadA*8 is TadA*8.1, TadA*8.2, TadA*8.3, TadA*8.4, TadA*8.5, TadA*8.6, TadA*8.7, TadA*8.8, TadA*8.9, TadA*8.10, TadA*8.11, TadA*8.12, TadA*8.13, TadA*8.14, TadA*8.15, TadA*8.16, TadA*8.17, TadA*8.18, TadA*8.19, TadA*8.20, TadA*8.21, TadA*8.22, TadA*8.23, or TadA*8.24. In some embodiments, the adenosine deaminase of the fusion protein comprises a TadA*9 and a cytidine deaminase.

[0453] Exemplary fusion protein structures include the following:
[0454] NH₂-[TadA*8]-[Cas9 domain]-COOH;
[0455] NH₂-[Cas9 domain]-[TadA*8]-COOH;
[0456] NH₂-[TadA*8]-[Cas12 domain]-COOH;
[0457] NH₂-[Cas12 domain]-[TadA*8]-COOH;
[0458] NH₂-[TadA*9]-[Cas9 domain]-COOH;
[0459] NH₂-[Cas9 domain]-[TadA*9]-COOH;
[0460] NH₂-[TadA*9]-[Cas12 domain]-COOH;
[0461] NH₂-[Cas12 domain]-[TadA*9]-COOH;
[0462] NH₂-[adenosine deaminase]-[Cas9/12]-[cytidine deaminase]-COOH;
[0463] NH₂-[cytidine deaminase]-[Cas9/12]-[adenosine deaminase]-COOH;
[0464] NH₂-[TadA*8]-[Cas9/12]-[cytidine deaminase]-COOH;
[0465] NH₂-[cytidine deaminase]-[Cas9/12]-[TadA*8]-COOH;
[0466] NH₂-[TadA*9]-[Cas9/12]-[cytidine deaminase]-COOH; or
[0467] NH₂-[cytidine deaminase]-[Cas9/12]-[TadA*9]-COOH.

[0468] In some embodiments, the fusion proteins comprising a cytidine deaminase, abasic editor, and/or adenosine deaminase and a napDNAbp (e.g., Cas9 domain) do not include a linker sequence. In some embodiments, a linker is present between the cytidine deaminase and adenosine deaminase domains and the napDNAbp. In some embodiments, the “-” used in the general architecture above indicates the presence of an optional linker. In some embodiments, the cytidine deaminase and adenosine deaminase and the napDNAbp are fused via any of the linkers provided herein. For example, in some embodiments the cytidine deaminase and adenosine deaminase and the napDNAbp are fused via any of the linkers provided herein.

[0469] It should be appreciated that the fusion proteins of the present disclosure may comprise one or more additional features. For example, in some embodiments, the fusion protein may comprise inhibitors, cytoplasmic localization sequences, export sequences, such as nuclear export sequences, or other localization sequences, as well as sequence tags that are useful for solubilization, purification, or detection of the fusion proteins. Suitable protein tags provided herein include, but are not limited to, biotin carboxylase carrier protein (BCCP) tags, myc-tags, calmodulin-tags, FLAG-tags, hemagglutinin (HA)-tags, polyhistidine tags, also referred to as histidine tags or His-tags, maltose binding protein (MBP)-tags, nus-tags, glutathione-S-transferase (GST)-tags, green fluorescent protein (GFP)-tags, thioredoxin-tags, S-tags, Softags (e.g., Softag 1, Softag 3), strep-tags, biotin ligase tags, FlAsH tags, V5 tags, and SBP-tags. Additional suitable sequences will be apparent to those of skill in the art. In some embodiments, the fusion protein comprises one or more His tags.

[0470] Exemplary, yet nonlimiting, fusion proteins are described in International PCT Application Nos. PCT/2017/044935, PCT/US2019/044935 and PCT/US2020/016288, each of which is incorporated herein by reference in its entirety.

### Fusion Proteins Comprising a Nuclear Localization Sequence (NLS)

[0471] In some embodiments, the fusion proteins provided herein further comprise one or more (e.g., 2, 3, 4, 5) nuclear targeting sequences, for example a nuclear localization sequence (NLS). In one embodiment, a bipartite NLS is used. In some embodiments, a NLS comprises an amino acid sequence that facilitates the importation of a protein, that comprises an NLS, into the cell nucleus (e.g., by nuclear transport). In some embodiments, any of the fusion proteins provided herein further comprise a nuclear localization sequence (NLS). In some embodiments, the NLS is fused to the N-terminus of the fusion protein. In some embodiments, the NLS is fused to the C-terminus of the fusion protein. In some embodiments, the NLS is fused to the N-terminus of the Cas9 domain. In some embodiments, the NLS is fused to the C-terminus of an nCas9 domain or a dCas9 domain. In some embodiments, the NLS is fused to the N-terminus of the deaminase. In some embodiments, the NLS is fused to the C-terminus of the deaminase. In some embodiments, the NLS is fused to the fusion protein via one or more linkers. In some embodiments, the NLS is fused to the fusion protein without a linker. In some embodiments, the NLS comprises an amino acid sequence of any one of the NLS sequences provided or referenced herein. Additional nuclear localization sequences are known in the art and would be apparent to the skilled artisan. For example, NLS sequences are described in Plank et al., PCT/EP2000/011690, the contents of which are incorporated herein by reference for their disclosure of exemplary nuclear localization sequences. In some embodiments, an NLS comprises the amino acid sequence PKKKRKVEGADKRTADGSEFESPKKKRKV, KRTADGSEFESPKKKRKV, KRPAATKKAGQAKKKK, KKTELQTTNAENKTKKL, KRGINDRNFWRGENGRKTR, RKSGKIAAIVVKRPRKPKKKRKV, or MDSLLMNRRKFLYQFKNVRWAKGRRETYLC.

[0472] In some embodiments, the fusion proteins comprising a cytidine or adenosine deaminase, a Cas9 domain, and an NLS do not comprise a linker sequence. In some embodiments, linker sequences between one or more of the domains or proteins (e.g., cytidine or adenosine deaminase, Cas9 domain or NLS) are present. In some embodiments, a linker is present between the cytidine deaminase and adenosine deaminase domains and the napDNAbp. In some embodiments, the “-” used in the general architecture below indicates the presence of an optional linker. In some embodiments, the cytidine deaminase and adenosine deaminase and the napDNAbp are fused via any of the linkers provided herein. For example, in some embodiments the cytidine deaminase and adenosine deaminase and the napDNAbp are fused via any of the linkers provided herein.

[0473] In some embodiments, the general architecture of exemplary napDNAbp (e.g., Cas9 or Cas12) fusion proteins with a cytidine or adenosine deaminase and a napDNAbp (e.g., Cas9 or Cas12) domain comprises any one of the following structures, where NLS is a nuclear localization sequence (e.g., any NLS provided herein), NH₂ is the N-terminus of the fusion protein, and COOH is the C-terminus of the fusion protein:
[0474] NH₂-NLS-[cytidine deaminase]-[napDNAbp domain]-COOH;
[0475] NH₂-NLS [napDNAbp domain]-[cytidine deaminase]-COOH;
[0476] NH₂-[cytidine deaminase]-[napDNAbp domain]-NLS-COOH;
[0477] NH₂-[napDNAbp domain]-[cytidine deaminase]-NLS-COOH;
[0478] NH₂-NLS-[adenosine deaminase]-[napDNAbp domain]-COOH;
[0479] NH₂-NLS [napDNAbp domain]-[adenosine deaminase]-COOH;
[0480] NH₂-[adenosine deaminase]-[napDNAbp domain]-NLS-COOH;
[0481] NH₂-[napDNAbp domain]-[adenosine deaminase]-NLS-COOH;
[0482] NH₂-NLS-[cytidine deaminase]-[napDNAbp domain]-[adenosine deaminase]-COOH;
[0483] NH₂-NLS-[adenosine deaminase]-[napDNAbp domain]-[cytidine deaminase]-COOH;
[0484] NH₂-NLS-[adenosine deaminase] [cytidine deaminase]-[napDNAbp domain]-COOH;
[0485] NH₂-NLS-[cytidine deaminase]-[adenosine deaminase]-[napDNAbp domain]-COOH;
[0486] NH₂-NLS-[napDNAbp domain]-[adenosine deaminase]-[cytidine deaminase]-COOH;
[0487] NH₂-NLS-[napDNAbp domain]-[cytidine deaminase]-[adenosine deaminase]-COOH;
[0488] NH₂-[cytidine deaminase]-[napDNAbp domain]-[adenosine deaminase]-NLS-COOH;
[0489] NH₂-[adenosine deaminase]-[napDNAbp domain]-[cytidine deaminase]-NLS-COOH;
[0490] NH₂-[adenosine deaminase] [cytidine deaminase]-[napDNAbp domain]-NLS-COOH;
[0491] NH₂-[cytidine deaminase]-[adenosine deaminase]-[napDNAbp domain]-NLS-COOH;
[0492] NH₂-[napDNAbp domain]-[adenosine deaminase]-[cytidine deaminase]-NLS-COOH; or
[0493] NH₂-[napDNAbp domain]-[cytidine deaminase]-[adenosine deaminase]-NLS-COOH.

[0494] In some embodiments, the NLS is present in a linker or the NLS is flanked by linkers, for example, the linkers described herein. In some embodiments, the N-terminus or C-terminus NLS is a bipartite NLS. A bipartite NLS comprises two basic amino acid clusters, which are separated by a relatively short spacer sequence (hence bipartite—2 parts, while monopartite NLSs are not). The NLS of nucleoplasmin, KR [PAAT KKAGQA] KKKK, is the prototype of the ubiquitous bipartite signal: two clusters of basic amino acids, separated by a spacer of about 10 amino acids. The sequence of an exemplary bipartite NLS follows:

### PKKKRKVEGADKRTADGSEFESPKKKRKV.

[0495] A vector that encodes a CRISPR enzyme comprising one or more nuclear localization sequences (NLSs) can be used. For example, there can be or be about 1, 2, 3, 4, 5, 6, 7, 8, 9, 10 NLSs used. A CRISPR enzyme can comprise the NLSs at or near the ammo-terminus, about or more than about 1, 2, 3, 4, 5, 6, 7, 8, 9, 10 NLSs at or near the carboxy-terminus, or any combination of these (e.g., one or more NLS at the ammo-terminus and one or more NLS at the carboxy terminus). When more than one NLS is present, each can be selected independently of others, such that a single NLS can be present in more than one copy and/or in combination with one or more other NLSs present in one or more copies.

[0496] CRISPR enzymes used in the methods can comprise about 6 NLSs. An NLS is considered near the N- or C-terminus when the nearest amino acid to the NLS is within about 50 amino acids along a polypeptide chain from the N- or C-terminus, e.g., within 1, 2, 3, 4, 5, 10, 15, 20, 25, 30, 40, or 50 amino acids.

Fusion Proteins with Internal Insertions

[0497] Provided herein are fusion proteins comprising a heterologous polypeptide fused to a nucleic acid programmable nucleic acid binding protein, for example, a napDNAbp. A heterologous polypeptide can be a polypeptide that is not found in the native or wild-type napDNAbp polypeptide sequence. The heterologous polypeptide can be fused to the napDNAbp at a C-terminal end of the napDNAbp, an N-terminal end of the napDNAbp, or inserted at an internal location of the napDNAbp. In some embodiments, the heterologous polypeptide is inserted at an internal location of the napDNAbp.

[0498] In some embodiments, the heterologous polypeptide is a deaminase or a functional fragment thereof. For example, a fusion protein can comprise a deaminase flanked by an N-terminal fragment and a C-terminal fragment of a Cas9 or Cas12 (e.g., Cas12b/C2c1), polypeptide. The deaminase in a fusion protein can be an adenosine deaminase. In some embodiments, the adenosine deaminase is a TadA (e.g., TadA*7.10, TadA*8 or TadA*9). In some embodiments, the TadA is a TadA*8. TadA sequences (e.g., TadA7.10, TadA*8 or TadA*9) as described herein are suitable deaminases for the above-described fusion proteins.

[0499] The deaminase can be a circular permutant deaminase. For example, the deaminase can be a circular permutant adenosine deaminase. In some embodiments, the deaminase is a circular permutant TadA, circularly permutated at amino acid residue 116 as numbered in the TadA reference sequence. In some embodiments, the deaminase is a circular permutant TadA, circularly permutated at amino acid residue 136 as numbered in the TadA reference sequence. In some embodiments, the deaminase is a circular permutant TadA, circularly permutated at amino acid residue 65 as numbered in the TadA reference sequence.

[0500] The fusion protein can comprise more than one deaminase. The fusion protein can comprise, for example, 1, 2, 3, 4, 5 or more deaminases. In some embodiments, the fusion protein comprises one deaminase. In some embodiments, the fusion protein comprises two deaminases. The two or more deaminases in a fusion protein can be an adenosine deaminase. cytidine deaminase, or a combination thereof. The two or more deaminases can be homodimers. The two or more deaminases can be heterodimers. The two or more deaminases can be inserted in tandem in the napDNAbp. In some embodiments, the two or more deaminases may not be in tandem in the napDNAbp.

[0501] In some embodiments, the napDNAbp in the fusion protein is a Cas9 polypeptide or a fragment thereof. The Cas9 polypeptide can be a variant Cas9 polypeptide. In some embodiments, the Cas9 polypeptide is a Cas9 nickase (nCas9) polypeptide or a fragment thereof. In some embodiments, the Cas9 polypeptide is a nuclease dead Cas9 (dCas9) polypeptide or a fragment thereof. The Cas9 polypeptide in a fusion protein can be a full-length Cas9 polypeptide. In some cases, the Cas9 polypeptide in a fusion protein may not be a full length Cas9 polypeptide. The Cas9 polypeptide can be truncated, for example, at a N-terminal or C-terminal end relative to a naturally-occurring Cas9 protein. The Cas9 polypeptide can be a circularly permuted Cas9 protein. The Cas9 polypeptide can be a fragment, a portion, or a domain of a Cas9 polypeptide, that is still capable of binding the target polynucleotide and a guide nucleic acid sequence.

[0502] In some embodiments, the Cas9 polypeptide is a Streptococcus pyogenes Cas9 (SpCas9), Staphylococcus aureus Cas9 (SaCas9), Streptococcus thermophilus 1 Cas9 (St1Cas9), or fragments or variants thereof.

[0503] The Cas9 polypeptide of a fusion protein can comprise an amino acid sequence that is at least 85%, at least 90%, at least 91%, at least 92%, at least 93%, at least 94%, at least 95%, at least 96%, at least 97%, at least 98%, at least 99%, or at least 99.5% identical to a naturally-occurring Cas9 polypeptide.

[0504] The Cas9 polypeptide of a fusion protein can comprise an amino acid sequence that is at least 85%, at least 90%, at least 91%, at least 92%, at least 93%, at least 94%, at least 95%, at least 96%, at least 97%, at least 98%, at least 99%, or at least 99.5% identical to the Cas9 amino acid sequence set forth below (called the “Cas9 reference sequence” below):

MDKKYSIGLDIGTNSVGWAVITDEYKVPSKKFKVLGNTDRHSIKKNLIGALLFDSGETAEAT
RLKRTARRRYTRRKNRICYLQEIFSNEMAKVDDSFFHRLEESFLVEEDKKHERHPIFGNIVD
EVAYHEKYPTIYHLRKKLVDSTDKADLRLIYLALAHMIKFRGHFLIEGDLNPDNSDVDKLFI
QLVQTYNQLFEENPINASGVDAKAILSARLSKSRRLENLIAQLPGEKKNGLFGNLIALSLGL
TPNFKSNFDLAEDAKLQLSKDTYDDDLDNLLAQIGDQYADLFLAAKNLSDAILLSDILRVNT
EITKAPLSASMIKRYDEHHQDLTLLKALVRQQLPEKYKEIFFDQSKNGYAGYIDGGASQEEF
YKFIKPILEKMDGTEELLVKLNREDLLRKQRTFDNGSIPHQIHLGELHAILRRQEDFYPFLK
DNREKIEKILTFRIPYYVGPLARGNSRFAWMTRKSEETITPWNFEEVVDKGASAQSFIERMT
NFDKNLPNEKVLPKHSLLYEYFTVYNELTKVKYVTEGMRKPAFLSGEQKKAIVDLLFKTNRK
VTVKQLKEDYFKKIECFDSVEISGVEDRFNASLGTYHDLLKIIKDKDFLDNEENEDILEDIV
LTLTLFEDREMIEERLKTYAHLFDDKVMKQLKRRRYTGWGRLSRKLINGIRDKQSGKTILDF
LKSDGFANRNFMQLIHDDSLTFKEDIQKAQVSGQGDSLHEHIANLAGSPAIKKGILQTVKVV
DELVKVMGRHKPENIVIEMARENQTTQKGQKNSRERMKRIEEGIKELGSQILKEHPVENTQL
QNEKLYLYYLQNGRDMYVDQELDINRLSDYDVDHIVPQSFLKDDSIDNKVLTRSDKNRGKSD
NVPSEEVVKKMKNYWRQLLNAKLITQRKFDNLTKAERGGLSELDKAGFIKRQLVETRQITKH
VAQILDSRMNTKYDENDKLIREVKVITLKSKLVSDFRKDFQFYKVREINNYHHAHDAYLNAV
VGTALIKKYPKLESEFVYGDYKVYDVRKMIAKSEQEIGKATAKYFEYSNIMNFEKTEITLAN
GEIRKRPLIETNGETGEIVWDKGRDFATVRKVLSMPQVNIVKKTEVQTGGFSKESILPKRNS
DKLIARKKDWDPKKYGGFDSPTVAYSVLVVAKVEKGKSKKLKSVKELLGITIMERSSFEKNP
IDFLEAKGYKEVKKDLIIKLPKYSLFELENGRKRMLASAGELQKGNELALPSKYVNFLYLAS
HYEKLKGSPEDNEQKQLFVEQHKHYLDEIIEQISEFSKRVILADANLDKVLSAYNKHRDKPI
REQAENIIHLFTLTNLGAPAAFKYFDTTIDRKRYTSTKEVLDATLIHQSITGLYETRIDLSQ
LGGD.

(single underline: HNH domain; double underline: RuvC domain)

[0505] Fusion proteins comprising a heterologous catalytic domain flanked by N- and C-terminal fragments of a Cas9 polypeptide are also useful for base editing in the methods as described herein. Fusion proteins comprising Cas9 and one or more deaminase domains, e.g., adenosine deaminase, or comprising an adenosine deaminase domain flanked by Cas9 sequences are also useful for highly specific and efficient base editing of target sequences. In an embodiment, a chimeric Cas9 fusion protein contains a heterologous catalytic domain (e.g., adenosine deaminase, cytidine deaminase, or adenosine deaminase and cytidine deaminase) inserted within a Cas9 polypeptide. In some embodiments, the fusion protein comprises an adenosine deaminase domain and a cytidine deaminase domain inserted within a Cas9. In some embodiments, an adenosine deaminase is fused within a Cas9 and a cytidine deaminase is fused to the C-terminus. In some embodiments, an adenosine deaminase is fused within Cas9 and a cytidine deaminase fused to the N-terminus. In some embodiments, a cytidine deaminase is fused within Cas9 and an adenosine deaminase is fused to the C-terminus. In some embodiments, a cytidine deaminase is fused within Cas9 and an adenosine deaminase fused to the N-terminus.

[0506] Exemplary structures of a fusion protein with an adenosine deaminase and a cytidine deaminase and a Cas9 are provided as follows:
[0507] NH₂-[Cas9(adenosine deaminase)]-[cytidine deaminase]-COOH;
[0508] NH₂-[cytidine deaminase]-[Cas9(adenosine deaminase)]-COOH;
[0509] NH₂-[Cas9(cytidine deaminase)]-[adenosine deaminase]-COOH; or
[0510] NH₂-[adenosine deaminase]-[Cas9(cytidine deaminase)]-COOH.

[0511] In some embodiments, the “-” used in the general architecture above indicates the presence of an optional linker.

[0512] In various embodiments, the catalytic domain has DNA modifying activity (e.g., deaminase activity), such as adenosine deaminase activity. In some embodiments, the adenosine deaminase is a TadA (e.g., TadA*7.10). In some embodiments, the TadA is a TadA*8 or TadA*9. In some embodiments, a TadA*8 or TadA*9 is fused within Cas9 and a cytidine deaminase is fused to the C-terminus. In some embodiments, a TadA*8 or TadA*9 is fused within Cas9 and a cytidine deaminase fused to the N-terminus. In some embodiments, a cytidine deaminase is fused within Cas9 and a TadA*8 or TadA*9 is fused to the C-terminus. In some embodiments, a cytidine deaminase is fused within Cas9 and a TadA*8 or TadA*9 fused to the N-terminus. Exemplary structures of a fusion protein with a TadA*8 or TadA*9 and a cytidine deaminase and a Cas9 are provided as follows:
[0513] NH₂-[Cas9(TadA*8 or TadA*9)]-[cytidine deaminase]-COOH;
[0514] NH₂-[cytidine deaminase]-[Cas9(TadA*8 or TadA*9)]-COOH-1;
[0515] NH₂-[Cas9(cytidine deaminase)]-[TadA*8 or TadA*9]-COOH; or
[0516] NH₂-[TadA*8 or TadA*9]-[Cas9(cytidine deaminase)]-COOH.
   In some embodiments, the “-” used in the general architecture above indicates the presence of an optional linker.

[0517] The heterologous polypeptide (e.g., deaminase) can be inserted in the napDNAbp (e.g., Cas9 or Cas12 (e.g., Cas12b/C2c1)) at a suitable location, for example, such that the napDNAbp retains its ability to bind the target polynucleotide and a guide nucleic acid. A deaminase (e.g., adenosine deaminase, cytidine deaminase, or adenosine deaminase and cytidine deaminase) can be inserted into a napDNAbp without compromising function of the deaminase (e.g., base editing activity) or the napDNAbp (e.g., ability to bind to target nucleic acid and guide nucleic acid). A deaminase (e.g., adenosine deaminase, cytidine deaminase, or adenosine deaminase and cytidine deaminase) can be inserted in the napDNAbp at, for example, a disordered region or a region comprising a high temperature factor or B-factor as shown by crystallographic studies. Regions of a protein that are less ordered, disordered, or unstructured, for example solvent exposed regions and loops, can be used for insertion without compromising structure or function. A deaminase (e.g., adenosine deaminase, cytidine deaminase, or adenosine deaminase and cytidine deaminase) can be inserted in the napDNAbp in a flexible loop region or a solvent-exposed region. In some embodiments, the deaminase (e.g., adenosine deaminase, cytidine deaminase, or adenosine deaminase and cytidine deaminase) is inserted in a flexible loop of the Cas9 or the Cas12b/C2c1 polypeptide.

[0518] In some embodiments, the insertion location of a deaminase (e.g., adenosine deaminase, cytidine deaminase, or adenosine deaminase and cytidine deaminase) is determined by B-factor analysis of the crystal structure of Cas9 polypeptide. In some embodiments, the deaminase (e.g., adenosine deaminase, cytidine deaminase, or adenosine deaminase and cytidine deaminase) is inserted in regions of the Cas9 polypeptide comprising higher than average B-factors (e.g., higher B factors compared to the total protein or the protein domain comprising the disordered region). B-factor or temperature factor can indicate the fluctuation of atoms from their average position (for example, as a result of temperature-dependent atomic vibrations or static disorder in a crystal lattice). A high B-factor (e.g., higher than average B-factor) for backbone atoms can be indicative of a region with relatively high local mobility. Such a region can be used for inserting a deaminase without compromising structure or function. A deaminase (e.g., adenosine deaminase, cytidine deaminase, or adenosine deaminase and cytidine deaminase) can be inserted at a location with a residue having a Ca atom with a B-factor that is 50%, 60%, 70%, 80%, 90%, 100%, 110%, 120%, 130%, 140%, 150%, 160%, 170%, 180%, 190%, 200%, or greater than 200% more than the average B-factor for the total protein. A deaminase (e.g., adenosine deaminase, cytidine deaminase, or adenosine deaminase and cytidine deaminase) can be inserted at a location with a residue having a Ca atom with a B-factor that is 50%, 60%, 70%, 80%, 90%, 100%, 110%, 120%, 130%, 140%, 150%, 160%, 170%, 180%, 190%, 200% or greater than 200% more than the average B-factor for a Cas9 protein domain comprising the residue. Cas9 polypeptide positions comprising a higher than average B-factor can include, for example, residues 768, 792, 1052, 1015, 1022, 1026, 1029, 1067, 1040, 1054, 1068, 1246, 1247, and 1248 as numbered in the above Cas9 reference sequence. Cas9 polypeptide regions comprising a higher than average B-factor can include, for example, residues 792-872, 792-906, and 2-791 as numbered in the above Cas9 reference sequence.

[0519] A heterologous polypeptide (e.g., deaminase) can be inserted in the napDNAbp at an amino acid residue selected from the group consisting of: 768, 791, 792, 1015, 1016, 1022, 1023, 1026, 1029, 1040, 1052, 1054, 1067, 1068, 1069, 1246, 1247, and 1248 as numbered in the above Cas9 reference sequence, or a corresponding amino acid residue in another Cas9 polypeptide. In some embodiments, the heterologous polypeptide is inserted between amino acid positions 768-769, 791-792, 792-793, 1015-1016, 1022-1023, 1026-1027, 1029-1030, 1040-1041, 1052-1053, 1054-1055, 1067-1068, 1068-1069, 1247-1248, or 1248-1249 as numbered in the above Cas9 reference sequence or corresponding amino acid positions thereof. In some embodiments, the heterologous polypeptide is inserted between amino acid positions 769-770, 792-793, 793-794, 1016-1017, 1023-1024, 1027-1028, 1030-1031, 1041-1042, 1053-1054, 1055-1056, 1068-1069, 1069-1070, 1248-1249, or 1249-1250 as numbered in the above Cas9 reference sequence or corresponding amino acid positions thereof. In some embodiments, the heterologous polypeptide replaces an amino acid residue selected from the group consisting of: 768, 791, 792, 1015, 1016, 1022, 1023, 1026, 1029, 1040, 1052, 1054, 1067, 1068, 1069, 1246, 1247, and 1248 as numbered in the above Cas9 reference sequence, or a corresponding amino acid residue in another Cas9 polypeptide. It should be understood that the reference to the above Cas9 reference sequence with respect to insertion positions is for illustrative purposes. The insertions as discussed herein are not limited to the Cas9 polypeptide sequence of the above Cas9 reference sequence, but include insertion at corresponding locations in variant Cas9 polypeptides, for example a Cas9 nickase (nCas9), nuclease dead Cas9 (dCas9), a Cas9 variant lacking a nuclease domain, a truncated Cas9, or a Cas9 domain lacking partial or complete HNH domain.

[0520] A heterologous polypeptide (e.g., deaminase) can be inserted in the napDNAbp at an amino acid residue selected from the group consisting of: 768, 792, 1022, 1026, 1040, 1068, and 1247 as numbered in the above Cas9 reference sequence, or a corresponding amino acid residue in another Cas9 polypeptide. In some embodiments, the heterologous polypeptide is inserted between amino acid positions 768-769, 792-793, 1022-1023, 1026-1027, 1029-1030, 1040-1041, 1068-1069, or 1247-1248 as numbered in the above Cas9 reference sequence or corresponding amino acid positions thereof. In some embodiments, the heterologous polypeptide is inserted between amino acid positions 769-770, 793-794, 1023-1024, 1027-1028, 1030-1031, 1041-1042, 1069-1070, or 1248-1249 as numbered in the above Cas9 reference sequence or corresponding amino acid positions thereof. In some embodiments, the heterologous polypeptide replaces an amino acid residue selected from the group consisting of: 768, 792, 1022, 1026, 1040, 1068, and 1247 as numbered in the above Cas9 reference sequence, or a corresponding amino acid residue in another Cas9 polypeptide.

[0521] A heterologous polypeptide (e.g., deaminase) can be inserted in the napDNAbp at an amino acid residue as described herein, or a corresponding amino acid residue in another Cas9 polypeptide. In an embodiment, a heterologous polypeptide (e.g., deaminase) can be inserted in the napDNAbp at an amino acid residue selected from the group consisting of: 1002, 1003, 1025, 1052-1056, 1242-1247, 1061-1077, 943-947, 686-691, 569-578, 530-539, and 1060-1077 as numbered in the above Cas9 reference sequence, or a corresponding amino acid residue in another Cas9 polypeptide. The deaminase (e.g., adenosine deaminase, cytidine deaminase, or adenosine deaminase and cytidine deaminase) can be inserted at the N-terminus or the C-terminus of the residue or replace the residue. In some embodiments, the deaminase (e.g., adenosine deaminase, cytidine deaminase, or adenosine deaminase and cytidine deaminase) is inserted at the C-terminus of the residue.

[0522] In some embodiments, an adenosine deaminase (e.g., TadA) is inserted at an amino acid residue selected from the group consisting of: 1015, 1022, 1029, 1040, 1068, 1247, 1054, 1026, 768, 1067, 1248, 1052, and 1246 as numbered in the above Cas9 reference sequence, or a corresponding amino acid residue in another Cas9 polypeptide. In some embodiments, an adenosine deaminase (e.g., TadA) is inserted in place of residues 792-872, 792-906, or 2-791 as numbered in the above Cas9 reference sequence, or a corresponding amino acid residue in another Cas9 polypeptide. In some embodiments, the adenosine deaminase is inserted at the N-terminus of an amino acid selected from the group consisting of: 1015, 1022, 1029, 1040, 1068, 1247, 1054, 1026, 768, 1067, 1248, 1052, and 1246 as numbered in the above Cas9 reference sequence, or a corresponding amino acid residue in another Cas9 polypeptide. In some embodiments, the adenosine deaminase is inserted at the C-terminus of an amino acid selected from the group consisting of: 1015, 1022, 1029, 1040, 1068, 1247, 1054, 1026, 768, 1067, 1248, 1052, and 1246 as numbered in the above Cas9 reference sequence, or a corresponding amino acid residue in another Cas9 polypeptide. In some embodiments, the adenosine deaminase is inserted to replace an amino acid selected from the group consisting of: 1015, 1022, 1029, 1040, 1068, 1247, 1054, 1026, 768, 1067, 1248, 1052, and 1246 as numbered in the above Cas9 reference sequence, or a corresponding amino acid residue in another Cas9 polypeptide.

[0523] In some embodiments, an adenosine deaminase (e.g., TadA*9) is inserted at an amino acid residue selected from the group consisting of: 1016, 1023, 1029, 1040, 1069, and 1247 as numbered in the above Cas9 reference sequence, or a corresponding amino acid residue in another Cas9 polypeptide. In some embodiments, the adenosine deaminase (e.g., TadA*9) is inserted at the N-terminus of an amino acid selected from the group consisting of: 1016, 1023, 1029, 1040, 1069, and 1247 as numbered in the above Cas9 reference sequence, or a corresponding amino acid residue in another Cas9 polypeptide. In some embodiments, the adenosine deaminase (e.g., TadA*9) is inserted at the C-terminus of an amino acid selected from the group consisting of: 1016, 1023, 1029, 1040, 1069, and 1247 as numbered in the above Cas9 reference sequence, or a corresponding amino acid residue in another Cas9 polypeptide. In some embodiments, the adenosine deaminase (e.g., TadA*9) is inserted to replace an amino acid selected from the group consisting of: 1016, 1023, 1029, 1040, 1069, and 1247 as numbered in the above Cas9 reference sequence, or a corresponding amino acid residue in another Cas9 polypeptide.

[0524] In some embodiments, the deaminase (e.g., adenosine deaminase, cytidine deaminase, or adenosine deaminase and cytidine deaminase) is inserted at amino acid residue 768 as numbered in the above Cas9 reference sequence, or a corresponding amino acid residue in another Cas9 polypeptide. In some embodiments, the deaminase (e.g., adenosine deaminase, cytidine deaminase, or adenosine deaminase and cytidine deaminase) is inserted at the N-terminus of amino acid residue 768 as numbered in the above Cas9 reference sequence, or a corresponding amino acid residue in another Cas9 polypeptide. In some embodiments, the deaminase (e.g., adenosine deaminase, cytidine deaminase, or adenosine deaminase and cytidine deaminase) is inserted at the C-terminus of amino acid residue 768 as numbered in the above Cas9 reference sequence, or a corresponding amino acid residue in another Cas9 polypeptide. In some embodiments, the deaminase (e.g., adenosine deaminase, cytidine deaminase, or adenosine deaminase and cytidine deaminase) is inserted to replace amino acid residue 768 as numbered in the above Cas9 reference sequence, or a corresponding amino acid residue in another Cas9 polypeptide.

[0525] In some embodiments, the deaminase (e.g., adenosine deaminase, cytidine deaminase, or adenosine deaminase and cytidine deaminase) is inserted at amino acid residue 791 or is inserted at amino acid residue 792, as numbered in the above Cas9 reference sequence, or a corresponding amino acid residue in another Cas9 polypeptide. In some embodiments, the deaminase (e.g., adenosine deaminase, cytidine deaminase, or adenosine deaminase and cytidine deaminase) is inserted at the N-terminus of amino acid residue 791 or is inserted at the N-terminus of amino acid 792, as numbered in the above Cas9 reference sequence, or a corresponding amino acid residue in another Cas9 polypeptide. In some embodiments, the deaminase (e.g., adenosine deaminase, cytidine deaminase, or adenosine deaminase and cytidine deaminase) is inserted at the C-terminus of amino acid 791 or is inserted at the N-terminus of amino acid 792, as numbered in the above Cas9 reference sequence, or a corresponding amino acid residue in another Cas9 polypeptide. In some embodiments, the deaminase (e.g., adenosine deaminase, cytidine deaminase, or adenosine deaminase and cytidine deaminase) is inserted to replace amino acid 791, or is inserted to replace amino acid 792, as numbered in the above Cas9 reference sequence, or a corresponding amino acid residue in another Cas9 polypeptide.

[0526] In some embodiments, the deaminase (e.g., adenosine deaminase, cytidine deaminase, or adenosine deaminase and cytidine deaminase) is inserted at amino acid residue 1016 as numbered in the above Cas9 reference sequence, or a corresponding amino acid residue in another Cas9 polypeptide. In some embodiments, the deaminase (e.g., adenosine deaminase, cytidine deaminase, or adenosine deaminase and cytidine deaminase) is inserted at the N-terminus of amino acid residue 1016 as numbered in the above Cas9 reference sequence, or a corresponding amino acid residue in another Cas9 polypeptide. In some embodiments, the deaminase (e.g., adenosine deaminase, cytidine deaminase, or adenosine deaminase and cytidine deaminase) is inserted at the C-terminus of amino acid residue 1016 as numbered in the above Cas9 reference sequence, or a corresponding amino acid residue in another Cas9 polypeptide. In some embodiments, the deaminase (e.g., adenosine deaminase, cytidine deaminase, or adenosine deaminase and cytidine deaminase) is inserted to replace amino acid residue 1016 as numbered in the above Cas9 reference sequence, or a corresponding amino acid residue in another Cas9 polypeptide.

[0527] In some embodiments, the deaminase (e.g., adenosine deaminase, cytidine deaminase, or adenosine deaminase and cytidine deaminase) is inserted at amino acid residue 1022, or is inserted at amino acid residue 1023, as numbered in the above Cas9 reference sequence, or a corresponding amino acid residue in another Cas9 polypeptide. In some embodiments, the deaminase (e.g., adenosine deaminase, cytidine deaminase, or adenosine deaminase and cytidine deaminase) is inserted at the N-terminus of amino acid residue 1022 or is inserted at the N-terminus of amino acid residue 1023, as numbered in the above Cas9 reference sequence, or a corresponding amino acid residue in another Cas9 polypeptide. In some embodiments, the deaminase (e.g., adenosine deaminase, cytidine deaminase, or adenosine deaminase and cytidine deaminase) is inserted at the C-terminus of amino acid residue 1022 or is inserted at the C-terminus of amino acid residue 1023, as numbered in the above Cas9 reference sequence, or a corresponding amino acid residue in another Cas9 polypeptide. In some embodiments, the deaminase (e.g., adenosine deaminase, cytidine deaminase, or adenosine deaminase and cytidine deaminase) is inserted to replace amino acid residue 1022, or is inserted to replace amino acid residue 1023, as numbered in the above Cas9 reference sequence, or a corresponding amino acid residue in another Cas9 polypeptide.

[0528] In some embodiments, the deaminase (e.g., adenosine deaminase, cytidine deaminase, or adenosine deaminase and cytidine deaminase) is inserted at amino acid residue 1026, or is inserted at amino acid residue 1029, as numbered in the above Cas9 reference sequence, or a corresponding amino acid residue in another Cas9 polypeptide. In some embodiments, the deaminase (e.g., adenosine deaminase, cytidine deaminase, or adenosine deaminase and cytidine deaminase) is inserted at the N-terminus of amino acid residue 1026 or is inserted at the N-terminus of amino acid residue 1029, as numbered in the above Cas9 reference sequence, or a corresponding amino acid residue in another Cas9 polypeptide. In some embodiments, the deaminase (e.g., adenosine deaminase, cytidine deaminase, or adenosine deaminase and cytidine deaminase) is inserted at the C-terminus of amino acid residue 1026 or is inserted at the C-terminus of amino acid residue 1029, as numbered in the above Cas9 reference sequence, or a corresponding amino acid residue in another Cas9 polypeptide. In some embodiments, the deaminase (e.g., adenosine deaminase, cytidine deaminase, or adenosine deaminase and cytidine deaminase) is inserted to replace amino acid residue 1026, or is inserted to replace amino acid residue 1029, as numbered in the above Cas9 reference sequence, or corresponding amino acid residue in another Cas9 polypeptide.

[0529] In some embodiments, the deaminase (e.g., adenosine deaminase, cytidine deaminase, or adenosine deaminase and cytidine deaminase) is inserted at amino acid residue 1040 as numbered in the above Cas9 reference sequence, or a corresponding amino acid residue in another Cas9 polypeptide. In some embodiments, the deaminase (e.g., adenosine deaminase, cytidine deaminase, or adenosine deaminase and cytidine deaminase) is inserted at the N-terminus of amino acid residue 1040 as numbered in the above Cas9 reference sequence, or a corresponding amino acid residue in another Cas9 polypeptide. In some embodiments, the deaminase (e.g., adenosine deaminase, cytidine deaminase, or adenosine deaminase and cytidine deaminase) is inserted at the C-terminus of amino acid residue 1040 as numbered in the above Cas9 reference sequence, or a corresponding amino acid residue in another Cas9 polypeptide. In some embodiments, the deaminase (e.g., adenosine deaminase, cytidine deaminase, or adenosine deaminase and cytidine deaminase) is inserted to replace amino acid residue 1040 as numbered in the above Cas9 reference sequence, or a corresponding amino acid residue in another Cas9 polypeptide.

[0530] In some embodiments, the deaminase (e.g., adenosine deaminase, cytidine deaminase, or adenosine deaminase and cytidine deaminase) is inserted at amino acid residue 1052, or is inserted at amino acid residue 1054, as numbered in the above Cas9 reference sequence, or a corresponding amino acid residue in another Cas9 polypeptide. In some embodiments, the deaminase (e.g., adenosine deaminase, cytidine deaminase, or adenosine deaminase and cytidine deaminase) is inserted at the N-terminus of amino acid residue 1052 or is inserted at the N-terminus of amino acid residue 1054, as numbered in the above Cas9 reference sequence, or a corresponding amino acid residue in another Cas9 polypeptide. In some embodiments, the deaminase (e.g., adenosine deaminase, cytidine deaminase, or adenosine deaminase and cytidine deaminase) is inserted at the C-terminus of amino acid residue 1052 or is inserted at the C-terminus of amino acid residue 1054, as numbered in the above Cas9 reference sequence, or a corresponding amino acid residue in another Cas9 polypeptide. In some embodiments, the deaminase (e.g., adenosine deaminase, cytidine deaminase, or adenosine deaminase and cytidine deaminase) is inserted to replace amino acid residue 1052, or is inserted to replace amino acid residue 1054, as numbered in the above Cas9 reference sequence, or a corresponding amino acid residue in another Cas9 polypeptide.

[0531] In some embodiments, the deaminase (e.g., adenosine deaminase, cytidine deaminase, or adenosine deaminase and cytidine deaminase) is inserted at amino acid residue 1067, or is inserted at amino acid residue 1068, or is inserted at amino acid residue 1069, as numbered in the above Cas9 reference sequence, or a corresponding amino acid residue in another Cas9 polypeptide. In some embodiments, the deaminase (e.g., adenosine deaminase, cytidine deaminase, or adenosine deaminase and cytidine deaminase) is inserted at the N-terminus of amino acid residue 1067 or is inserted at the N-terminus of amino acid residue 1068 or is inserted at the N-terminus of amino acid residue 1069, as numbered in the above Cas9 reference sequence, or a corresponding amino acid residue in another Cas9 polypeptide. In some embodiments, the deaminase (e.g., adenosine deaminase, cytidine deaminase, or adenosine deaminase and cytidine deaminase) is inserted at the C-terminus of amino acid residue 1067 or is inserted at the C-terminus of amino acid residue 1068 or is inserted at the C-terminus of amino acid residue 1069, as numbered in the above Cas9 reference sequence, or a corresponding amino acid residue in another Cas9 polypeptide. In some embodiments, the deaminase (e.g., adenosine deaminase, cytidine deaminase, or adenosine deaminase and cytidine deaminase) is inserted to replace amino acid residue 1067, or is inserted to replace amino acid residue 1068, or is inserted to replace amino acid residue 1069, as numbered in the above Cas9 reference sequence, or a corresponding amino acid residue in another Cas9 polypeptide.

[0532] In some embodiments, the deaminase (e.g., adenosine deaminase, cytidine deaminase, or adenosine deaminase and cytidine deaminase) is inserted at amino acid residue 1246, or is inserted at amino acid residue 1247, or is inserted at amino acid residue 1248, as numbered in the above Cas9 reference sequence, or a corresponding amino acid residue in another Cas9 polypeptide. In some embodiments, the deaminase (e.g., adenosine deaminase, cytidine deaminase, or adenosine deaminase and cytidine deaminase) is inserted at the N-terminus of amino acid residue 1246 or is inserted at the N-terminus of amino acid residue 1247 or is inserted at the N-terminus of amino acid residue 1248, as numbered in the above Cas9 reference sequence, or a corresponding amino acid residue in another Cas9 polypeptide. In some embodiments, the deaminase (e.g., adenosine deaminase, cytidine deaminase, or adenosine deaminase and cytidine deaminase) is inserted at the C-terminus of amino acid residue 1246 or is inserted at the C-terminus of amino acid residue 1247 or is inserted at the C-terminus of amino acid residue 1248, as numbered in the above Cas9 reference sequence, or a corresponding amino acid residue in another Cas9 polypeptide. In some embodiments, the deaminase (e.g., adenosine deaminase, cytidine deaminase, or adenosine deaminase and cytidine deaminase) is inserted to replace amino acid residue 1246, or is inserted to replace amino acid residue 1247, or is inserted to replace amino acid residue 1248, as numbered in the above Cas9 reference sequence, or a corresponding amino acid residue in another Cas9 polypeptide.

[0533] In some embodiments, a heterologous polypeptide (e.g., deaminase) is inserted in a flexible loop of a Cas9 polypeptide. The flexible loop portions can be selected from the group consisting of 530-537, 569-570, 686-691, 943-947, 1002-1025, 1052-1077, 1232-1247, or 1298-1300 as numbered in the above Cas9 reference sequence, or a corresponding amino acid residue in another Cas9 polypeptide. The flexible loop portions can be selected from the group consisting of: 1-529, 538-568, 580-685, 692-942, 948-1001, 1026-1051, 1078-1231, or 1248-1297 as numbered in the above Cas9 reference sequence, or a corresponding amino acid residue in another Cas9 polypeptide.

[0534] A heterologous polypeptide (e.g., adenine deaminase) can be inserted into a Cas9 polypeptide region corresponding to amino acid residues: 1017-1069, 1242-1247, 1052-1056, 1060-1077, 1002-1003, 943-947, 530-537, 568-579, 686-691, 1242-1247, 1298-1300, 1066-1077, 1052-1056, or 1060-1077 as numbered in the above Cas9 reference sequence, or a corresponding amino acid residue in another Cas9 polypeptide.

[0535] A heterologous polypeptide (e.g., adenine deaminase) can be inserted in place of a deleted region of a Cas9 polypeptide. The deleted region can correspond to an N-terminal or C-terminal portion of the Cas9 polypeptide. In some embodiments, the deleted region corresponds to residues 792-872 as numbered in the above Cas9 reference sequence, or a corresponding amino acid residue in another Cas9 polypeptide. In some embodiments, the deleted region corresponds to residues 792-906 as numbered in the above Cas9 reference sequence, or a corresponding amino acid residue in another Cas9 polypeptide. In some embodiments, the deleted region corresponds to residues 2-791 as numbered in the above Cas9 reference sequence, or a corresponding amino acid residue in another Cas9 polypeptide. In some embodiments, the deleted region corresponds to residues 1017-1069 as numbered in the above Cas9 reference sequence, or corresponding amino acid residues thereof.

[0536] Exemplary internal fusions base editors are provided in Table 6 below:

TABLE 6
Insertion loci in Cas9 proteins

| BE ID | Modification | Other ID |
|---|---|---|
| IBE001 | Cas9 TadA ins 1015 | ISLAY01 |
| IBE002 | Cas9 TadA ins 1022 | ISLAY02 |
| IBE003 | Cas9 TadA ins 1029 | ISLAY03 |
| IBE004 | Cas9 TadA ins 1040 | ISLAY04 |
| IBE005 | Cas9 TadA ins 1068 | ISLAY05 |
| IBE006 | Cas9 TadA ins 1247 | ISLAY06 |
| IBE007 | Cas9 TadA ins 1054 | ISLAY07 |
| IBE008 | Cas9 TadA ins 1026 | ISLAY08 |
| IBE009 | Cas9 TadA ins 768 | ISLAY09 |
| IBE020 | delta HNH TadA 792 | ISLAY20 |
| IBE021 | N-term fusion single TadA helix truncated 165-end | ISLAY21 |
| IBE029 | TadA-Circular Permutant116 ins1067 | ISLAY29 |
| IBE031 | TadA- Circular Permutant 136 ins1248 | ISLAY31 |
| IBE032 | TadA- Circular Permutant 136ins 1052 | ISLAY32 |
| IBE035 | delta 792-872 TadA ins | ISLAY35 |
| IBE036 | delta 792-906 TadA ins | ISLAY36 |
| IBE043 | TadA-Circular Permutant 65 ins1246 | ISLAY43 |
| IBE044 | TadA ins C-term truncate2 791 | ISLAY44 |

[0537] A heterologous polypeptide (e.g., deaminase) can be inserted within a structural or functional domain of a Cas9 polypeptide. A heterologous polypeptide (e.g., deaminase) can be inserted between two structural or functional domains of a Cas9 polypeptide. A heterologous polypeptide (e.g., deaminase) can be inserted in place of a structural or functional domain of a Cas9 polypeptide, for example, after deleting the domain from the Cas9 polypeptide. The structural or functional domains of a Cas9 polypeptide can include, for example, RuvC I, RuvC II, RuvC III, Rec1, Rec2, PI, or HNH.

[0538] In some embodiments, the Cas9 polypeptide lacks one or more domains selected from the group consisting of: RuvC I, RuvC II, RuvC III, Rec1, Rec2, PI, or HNH domain. In some embodiments, the Cas9 polypeptide lacks a nuclease domain. In some embodiments, the Cas9 polypeptide lacks an HNH domain. In some embodiments, the Cas9 polypeptide lacks a portion of the HNH domain such that the Cas9 polypeptide has reduced or abolished HNH activity. In some embodiments, the Cas9 polypeptide comprises a deletion of the nuclease domain, and the deaminase is inserted to replace the nuclease domain. In some embodiments, the HNH domain is deleted and the deaminase is inserted in its place. In some embodiments, one or more of the RuvC domains is deleted and the deaminase is inserted in its place.

[0539] A fusion protein comprising a heterologous polypeptide can be flanked by a N-terminal and a C-terminal fragment of a napDNAbp. In some embodiments, the fusion protein comprises a deaminase flanked by a N-terminal fragment and a C-terminal fragment of a Cas9 polypeptide. The N terminal fragment or the C terminal fragment can bind the target polynucleotide sequence. The C-terminus of the N terminal fragment or the N-terminus of the C terminal fragment can comprise a part of a flexible loop of a Cas9 polypeptide. The C-terminus of the N terminal fragment or the N-terminus of the C terminal fragment can comprise a part of an alpha-helix structure of the Cas9 polypeptide. The N-terminal fragment or the C-terminal fragment can comprise a DNA binding domain. The N-terminal fragment or the C-terminal fragment can comprise a RuvC domain. The N-terminal fragment or the C-terminal fragment can comprise an HNH domain. In some embodiments, neither of the N-terminal fragment and the C-terminal fragment comprises an HNH domain.

[0540] In some embodiments, the C-terminus of the N terminal Cas9 fragment comprises an amino acid that is in proximity to a target nucleobase when the fusion protein deaminates the target nucleobase. In some embodiments, the N-terminus of the C terminal Cas9 fragment comprises an amino acid that is in proximity to a target nucleobase when the fusion protein deaminates the target nucleobase. The insertion location of different deaminases can be different in order to have proximity between the target nucleobase and an amino acid in the C-terminus of the N terminal Cas9 fragment or the N-terminus of the C terminal Cas9 fragment. For example, the insertion position of an adenosine deaminase can be at an amino acid residue selected from the group consisting of: 1015, 1022, 1029, 1040, 1068, 1247, 1054, 1026, 768, 1067, 1248, 1052, and 1246 as numbered in the above Cas9 reference sequence, or a corresponding amino acid residue in another Cas9 polypeptide.

[0541] The N-terminal Cas9 fragment of a fusion protein (i.e. the N-terminal Cas9 fragment flanking the deaminase in a fusion protein) can comprise the N-terminus of a Cas9 polypeptide. The N-terminal Cas9 fragment of a fusion protein can comprise a length of at least about: 100, 200, 300, 400, 500, 600, 700, 800, 900, 1000, 1100, 1200, or 1300 amino acids. The N-terminal Cas9 fragment of a fusion protein can comprise a sequence corresponding to amino acid residues: 1-56, 1-95, 1-200, 1-300, 1-400, 1-500, 1-600, 1-700, 1-718, 1-765, 1-780, 1-906, 1-918, or 1-1100 as numbered in the above Cas9 reference sequence, or a corresponding amino acid residue in another Cas9 polypeptide. The N-terminal Cas9 fragment can comprise a sequence comprising at least: 85%, at least 90%, at least 91%, at least 92%, at least 93%, at least 94%, at least 95%, at least 96%, at least 97%, at least 98%, at least 99%, or at least 99.5% sequence identity to amino acid residues: 1-56, 1-95, 1-200, 1-300, 1-400, 1-500, 1-600, 1-700, 1-718, 1-765, 1-780, 1-906, 1-918, or 1-1100 as numbered in the above Cas9 reference sequence, or a corresponding amino acid residue in another Cas9 polypeptide.

[0542] The C-terminal Cas9 fragment of a fusion protein (i.e. the C-terminal Cas9 fragment flanking the deaminase in a fusion protein) can comprise the C-terminus of a Cas9 polypeptide. The C-terminal Cas9 fragment of a fusion protein can comprise a length of at least about: 100, 200, 300, 400, 500, 600, 700, 800, 900, 1000, 1100, 1200, or 1300 amino acids. The C-terminal Cas9 fragment of a fusion protein can comprise a sequence corresponding to amino acid residues: 1099-1368, 918-1368, 906-1368, 780-1368, 765-1368, 718-1368, 94-1368, or 56-1368 as numbered in the above Cas9 reference sequence, or a corresponding amino acid residue in another Cas9 polypeptide. The N-terminal Cas9 fragment can comprise a sequence comprising at least: 85%, at least 90%, at least 91%, at least 92%, at least 93%, at least 94%, at least 95%, at least 96%, at least 97%, at least 98%, at least 99%, or at least 99.5% sequence identity to amino acid residues: 1099-1368, 918-1368, 906-1368, 780-1368, 765-1368, 718-1368, 94-1368, or 56-1368 as numbered in the above Cas9 reference sequence, or a corresponding amino acid residue in another Cas9 polypeptide.

[0543] The N-terminal Cas9 fragment and C-terminal Cas9 fragment of a fusion protein taken together may not correspond to a full-length naturally occurring Cas9 polypeptide sequence, for example, as set forth in the above Cas9 reference sequence.

[0544] The fusion protein described herein can effect targeted deamination with reduced deamination at non-target sites (e.g., off-target sites), such as reduced genome wide spurious deamination. The fusion protein described herein can effect targeted deamination with reduced bystander deamination at non-target sites. The undesired deamination or off-target deamination can be reduced by at least 30%, at least 40%, at least 50%, at least 60%, at least 70%, at least 80%, at least 90%, at least 95%, or at least 99% compared with, for example, an end terminus fusion protein comprising the deaminase fused to a N terminus or a C terminus of a Cas9 polypeptide. The undesired deamination or off-target deamination can be reduced by at least one-fold, at least two-fold, at least three-fold, at least four-fold, at least five-fold, at least tenfold, at least fifteen fold, at least twenty fold, at least thirty fold, at least forty fold, at least fifty fold, at least 60 fold, at least 70 fold, at least 80 fold, at least 90 fold, or at least hundred fold, compared with, for example, an end terminus fusion protein comprising the deaminase fused to a N terminus or a C terminus of a Cas9 polypeptide.

[0545] In some embodiments, the deaminase (e.g., adenosine deaminase, cytidine deaminase, or adenosine deaminase and cytidine deaminase) of the fusion protein deaminates no more than two nucleobases within the range of an R-loop. In some embodiments, the deaminase of the fusion protein deaminates no more than three nucleobases within the range of the R-loop. In some embodiments, the deaminase of the fusion protein deaminates no more than 2, 3, 4, 5, 6, 7, 8, 9, or 10 nucleobases within the range of the R-loop. An R-loop is a three-stranded nucleic acid structure including a DNA:RNA hybrid, a DNA:DNA or an RNA: RNA complementary structure and the associated with single-stranded DNA. As used herein, an R-loop may be formed when a target polynucleotide is contacted with a CRISPR complex or a base editing complex, wherein a portion of a guide polynucleotide, e.g. a guide RNA, hybridizes with and displaces with a portion of a target polynucleotide, e.g. a target DNA. In some embodiments, an R-loop comprises a hybridized region of a spacer sequence and a target DNA complementary sequence. An R-loop region may be of about 5, 6, 7, 8, 9, 10, 11, 12, 13, 14, 15, 16, 17, 18, 19, 20, 21, 22, 23, 24, 25, 26, 27, 28, 29, 30, 31, 32, 33, 34, 35, 36, 37, 38, 39, 40, 41, 42, 43, 44, 45, 46, 47, 48, 49, or 50 nucleobase pairs in length. In some embodiments, the R-loop region is about 20 nucleobase pairs in length. It should be understood that, as used herein, an R-loop region is not limited to the target DNA strand that hybridizes with the guide polynucleotide. For example, editing of a target nucleobase within an R-loop region may be to a DNA strand that comprises the complementary strand to a guide RNA, or may be to a DNA strand that is the opposing strand of the strand complementary to the guide RNA. In some embodiments, editing in the region of the R-loop comprises editing a nucleobase on non-complementary strand (protospacer strand) to a guide RNA in a target DNA sequence.

[0546] The fusion protein described herein can effect target deamination in an editing window different from canonical base editing. In some embodiments, a target nucleobase is from about 1 to about 20 bases upstream of a PAM sequence in the target polynucleotide sequence. In some embodiments, a target nucleobase is from about 2 to about 12 bases upstream of a PAM sequence in the target polynucleotide sequence. In some embodiments, a target nucleobase is from about 1 to 9 base pairs, about 2 to 10 base pairs, about 3 to 11 base pairs, about 4 to 12 base pairs, about 5 to 13 base pairs, about 6 to 14 base pairs, about 7 to 15 base pairs, about 8 to 16 base pairs, about 9 to 17 base pairs, about 10 to 18 base pairs, about 11 to 19 base pairs, about 12 to 20 base pairs, about 1 to 7 base pairs, about 2 to 8 base pairs, about 3 to 9 base pairs, about 4 to 10 base pairs, about 5 to 11 base pairs, about 6 to 12 base pairs, about 7 to 13 base pairs, about 8 to 14 base pairs, about 9 to 15 base pairs, about 10 to 16 base pairs, about 11 to 17 base pairs, about 12 to 18 base pairs, about 13 to 19 base pairs, about 14 to 20 base pairs, about 1 to 5 base pairs, about 2 to 6 base pairs, about 3 to 7 base pairs, about 4 to 8 base pairs, about 5 to 9 base pairs, about 6 to 10 base pairs, about 7 to 11 base pairs, about 8 to 12 base pairs, about 9 to 13 base pairs, about 10 to 14 base pairs, about 11 to 15 base pairs, about 12 to 16 base pairs, about 13 to 17 base pairs, about 14 to 18 base pairs, about 15 to 19 base pairs, about 16 to 20 base pairs, about 1 to 3 base pairs, about 2 to 4 base pairs, about 3 to 5 base pairs, about 4 to 6 base pairs, about 5 to 7 base pairs, about 6 to 8 base pairs, about 7 to 9 base pairs, about 8 to 10 base pairs, about 9 to 11 base pairs, about 10 to 12 base pairs, about 11 to 13 base pairs, about 12 to 14 base pairs, about 13 to 15 base pairs, about 14 to 16 base pairs, about 15 to 17 base pairs, about 16 to 18 base pairs, about 17 to 19 base pairs, about 18 to 20 base pairs away or upstream of the PAM sequence. In some embodiments, a target nucleobase is about 1, 2, 3, 4, 5, 6, 7, 8, 9, 10, 11, 12, 13, 14, 15, 16, 17, 18, 19, 20, or more base pairs away from or upstream of the PAM sequence. In some embodiments, a target nucleobase is about 1, 2, 3, 4, 5, 6, 7, 8, or 9 base pairs upstream of the PAM sequence. In some embodiments, a target nucleobase is about 2, 3, 4, or 6 base pairs upstream of the PAM sequence.

[0547] The fusion protein can comprise more than one heterologous polypeptide. For example, the fusion protein can additionally comprise one or more UGI domains and/or one or more nuclear localization signals. The two or more heterologous domains can be inserted in tandem. The two or more heterologous domains can be inserted at locations such that they are not in tandem in the NapDNAbp.

[0548] A fusion protein can comprise a linker between the deaminase and the napDNAbp polypeptide. The linker can be a peptide or a non-peptide linker. For example, the linker can be an XTEN, (GGGS)n, (GGGGS)n, (G)n, (EAAAK)n, (GGS)n, SGSETPGTSESATPES. In some embodiments, the fusion protein comprises a linker between the N-terminal Cas9 fragment and the deaminase. In some embodiments, the fusion protein comprises a linker between the C-terminal Cas9 fragment and the deaminase. In some embodiments, the N-terminal and C-terminal fragments of napDNAbp are connected to the deaminase with a linker. In some embodiments, the N-terminal and C-terminal fragments are joined to the deaminase domain without a linker. In some embodiments, the fusion protein comprises a linker between the N-terminal Cas9 fragment and the deaminase, but does not comprise a linker between the C-terminal Cas9 fragment and the deaminase. In some embodiments, the fusion protein comprises a linker between the C-terminal Cas9 fragment and the deaminase, but does not comprise a linker between the N-terminal Cas9 fragment and the deaminase.

[0549] In some embodiments, the napDNAbp in the fusion protein is a Cas12 polypeptide, e.g., Cas12b/C2c1, or a fragment thereof. The Cas12 polypeptide can be a variant Cas12 polypeptide. In other embodiments, the N- or C-terminal fragments of the Cas12 polypeptide comprise a nucleic acid programmable DNA binding domain or a RuvC domain. In other embodiments, the fusion protein contains a linker between the Cas12 polypeptide and the catalytic domain. In other embodiments, the amino acid sequence of the linker is GGSGGS or GSSGSETPGTSESATPESSG. In other embodiments, the linker is a rigid linker. In other embodiments of the above aspects, the linker is encoded by GGAGGCTCTGGAGGAAGC or GGCTCTTCTGGATCTGAAACACCTGGCACAAGCGAGAGCGCCACCCCTGAGAGCTCTGGC.

[0550] Fusion proteins comprising a heterologous catalytic domain flanked by N- and C-terminal fragments of a Cas12 polypeptide are also useful for base editing in the methods as described herein. Fusion proteins comprising Cas12 and one or more deaminase domains, e.g., adenosine deaminase, or comprising an adenosine deaminase domain flanked by Cas12 sequences are also useful for highly specific and efficient base editing of target sequences. In an embodiment, a chimeric Cas12 fusion protein contains a heterologous catalytic domain (e.g., adenosine deaminase, cytidine deaminase, or adenosine deaminase and cytidine deaminase) inserted within a Cas12 polypeptide. In some embodiments, the fusion protein comprises an adenosine deaminase domain and a cytidine deaminase domain inserted within a Cas12. In some embodiments, an adenosine deaminase is fused within Cas12 and a cytidine deaminase is fused to the C-terminus. In some embodiments, an adenosine deaminase is fused within Cas12 and a cytidine deaminase fused to the N-terminus. In some embodiments, a cytidine deaminase is fused within Cas12 and an adenosine deaminase is fused to the C-terminus. In some embodiments, a cytidine deaminase is fused within Cas12 and an adenosine deaminase fused to the N-terminus. Exemplary structures of a fusion protein with an adenosine deaminase and a cytidine deaminase and a Cas12 are provided as follows:
[0551] NH₂-[Cas12(adenosine deaminase)]-[cytidine deaminase]-COOH;
[0552] NH₂-[cytidine deaminase]-[Cas12(adenosine deaminase)]-COOH;
[0553] NH₂-[Cas12(cytidine deaminase)]-[adenosine deaminase]-COOH; or
[0554] NH₂-[adenosine deaminase]-[Cas12(cytidine deaminase)]-COOH;
   In some embodiments, the “-” used in the general architecture above indicates the presence of an optional linker.

[0555] In various embodiments, the catalytic domain has DNA modifying activity (e.g., deaminase activity), such as adenosine deaminase activity. In some embodiments, the adenosine deaminase is a TadA (e.g., TadA*7.10). In some embodiments, the TadA is a TadA*8 or TadA*9. In some embodiments, a TadA*8 or TadA*9 is fused within Cas12 and a cytidine deaminase is fused to the C-terminus. In some embodiments, a TadA*8 or TadA*9 is fused within Cas12 and a cytidine deaminase fused to the N-terminus. In some embodiments, a cytidine deaminase is fused within Cas12 and a TadA*8 or TadA*9 is fused to the C-terminus. In some embodiments, a cytidine deaminase is fused within Cas12 and a TadA*8 or TadA*9 fused to the N-terminus. Exemplary structures of a fusion protein with a TadA*8 or TadA*9 and a cytidine deaminase and a Cas12 are provided as follows:
[0556] N-[Cas12(TadA*8 or TadA*9)]-[cytidine deaminase]-C;
[0557] N-[cytidine deaminase]-[Cas12(TadA*8 or TadA*9)]-C;
[0558] N-[Cas12(cytidine deaminase)]-[TadA*8 or TadA*9]-C; or
[0559] N-[TadA*8 or TadA*9]-[Cas12(cytidine deaminase)]-C.
   In some embodiments, the “-” used in the general architecture above indicates the presence of an optional linker.

[0560] In other embodiments, the fusion protein contains one or more catalytic domains. In other embodiments, at least one of the one or more catalytic domains is inserted within the Cas12 polypeptide or is fused at the Cas12 N-terminus or C-terminus. In other embodiments, at least one of the one or more catalytic domains is inserted within a loop, an alpha helix region, an unstructured portion, or a solvent accessible portion of the Cas12 polypeptide. In other embodiments, the Cas12 polypeptide is Cas12a, Cas12b, Cas12c, Cas12d, Cas12e, Cas12g, Cas12h, Cas12i, or Cas12j/CasΦ. In other embodiments, the Cas12 polypeptide has at least about 85% amino acid sequence identity to Bacillus hisashii Cas12b, Bacillus thermoamylovorans Cas12b, Bacillus sp. V3-13 Cas12b, or Alicyclobacillus acidiphilus Cas12b. In other embodiments, the Cas12 polypeptide has at least about 90% amino acid sequence identity to Bacillus hisashii Cas12b, Bacillus thermoamylovorans Cas12b, Bacillus sp. V3-13 Cas12b, or Alicyclobacillus acidiphilus Cas12b. In other embodiments, the Cas12 polypeptide has at least about 95% amino acid sequence identity to Bacillus hisashii Cas12b, Bacillus thermoamylovorans Cas12b, Bacillus sp. V3-13 Cas12b, or Alicyclobacillus acidiphilus Cas12b. In other embodiments, the Cas12 polypeptide contains or consists essentially of a fragment of Bacillus hisashii Cas12b, Bacillus thermoamylovorans Cas12b, Bacillus sp. V3-13 Cas12b, or Alicyclobacillus acidiphilus Cas12b.

[0561] In other embodiments, the catalytic domain is inserted between amino acid positions 153-154, 255-256, 306-307, 980-981, 1019-1020, 534-535, 604-605, or 344-345 of BhCas12b or a corresponding amino acid residue of Cas12a, Cas12c, Cas12d, Cas12e, Cas12g, Cas12h, Cas12i, or Cas12j/CasΦ. In other embodiments, the catalytic domain is inserted between amino acids P153 and 5154 of BhCas12b. In other embodiments, the catalytic domain is inserted between amino acids K255 and E256 of BhCas12b. In other embodiments, the catalytic domain is inserted between amino acids D980 and G981 of BhCas12b. In other embodiments, the catalytic domain is inserted between amino acids K1019 and L1020 of BhCas12b. In other embodiments, the catalytic domain is inserted between amino acids F534 and P535 of BhCas12b. In other embodiments, the catalytic domain is inserted between amino acids K604 and G605 of BhCas12b. In other embodiments, the catalytic domain is inserted between amino acids H344 and F345 of BhCas12b. In other embodiments, catalytic domain is inserted between amino acid positions 147 and 148, 248 and 249, 299 and 300, 991 and 992, or 1031 and 1032 of BvCas12b or a corresponding amino acid residue of Cas12a, Cas12c, Cas12d, Cas12e, Cas12g, Cas12h, Cas12i, or Cas12j/CasΦ. In other embodiments, the catalytic domain is inserted between amino acids P147 and D148 of BvCas12b. In other embodiments, the catalytic domain is inserted between amino acids G248 and G249 of BvCas12b. In other embodiments, the catalytic domain is inserted between amino acids P299 and E300 of BvCas12b. In other embodiments, the catalytic domain is inserted between amino acids G991 and E992 of BvCas12b. In other embodiments, the catalytic domain is inserted between amino acids K1031 and M1032 of BvCas12b. In other embodiments, the catalytic domain is inserted between amino acid positions 157 and 158, 258 and 259, 310 and 311, 1008 and 1009, or 1044 and 1045 of AaCas12b or a corresponding amino acid residue of Cas12a, Cas12c, Cas12d, Cas12e, Cas12g, Cas12h, Cas12i, or Cas12j/CasΦ. In other embodiments, the catalytic domain is inserted between amino acids P157 and G158 of AaCas12b. In other embodiments, the catalytic domain is inserted between amino acids V258 and G259 of AaCas12b. In other embodiments, the catalytic domain is inserted between amino acids D310 and P311 of AaCas12b. In other embodiments, the catalytic domain is inserted between amino acids G1008 and E1009 of AaCas12b. In other embodiments, the catalytic domain is inserted between amino acids G1044 and K1045 at of AaCas12b.

[0562] In other embodiments, the fusion protein contains a nuclear localization signal (e.g., a bipartite nuclear localization signal). In other embodiments, the amino acid sequence of the nuclear localization signal is MAPKKKRKVGIHGVPAA. In other embodiments of the above aspects, the nuclear localization signal is encoded by the following sequence: ATGGCCCCAAAGAAGAAGCGGAAGGTCGGTATCCACGGAGTCCCAGCAGCC. In other embodiments, the Cas12b polypeptide contains a mutation that silences the catalytic activity of a RuvC domain. In other embodiments, the Cas12b polypeptide contains D574A, D829A and/or D952A mutations. In other embodiments, the fusion protein further contains a tag (e.g., an influenza hemaglutinin tag).

[0563] In some embodiments, the fusion protein comprises a napDNAbp domain (e.g., Cas12-derived domain) with an internally fused nucleobase editing domain (e.g., all or a portion of a deaminase domain, e.g., an adenosine deaminase domain). In some embodiments, the napDNAbp is a Cas12b. In some embodiments, the base editor comprises a BhCas12b domain with an internally fused TadA*8 domain inserted at the loci provided in Table 7 below.

TABLE 7
Insertion loci in Cas12b proteins

| | Insertion site | Inserted between aa |
|---|---|---|
| BhCas12b | | |
| position 1 | 153 | PS |
| position 2 | 255 | KE |
| position 3 | 306 | DE |
| position 4 | 980 | DG |
| position 5 | 1019 | KL |
| position 6 | 534 | FP |
| position 7 | 604 | KG |
| position 8 | 344 | HF |
| BvCas12b | | |
| position 1 | 147 | PD |
| position 2 | 248 | GG |
| position 3 | 299 | PE |
| position 4 | 991 | GE |
| position 5 | 1031 | KM |
| AaCas12b | | |
| position 1 | 157 | PG |
| position 2 | 258 | VG |
| position 3 | 310 | DP |
| position 4 | 1008 | GE |
| position 5 | 1044 | GK |

[0564] By way of nonlimiting example, an adenosine deaminase (e.g., ABE8.13) may be inserted into a BhCas12b to produce a fusion protein (e.g., ABE8.13-BhCas12b) that effectively edits a nucleic acid sequence.

[0565] In some embodiments, the base editing system described herein comprises an ABE with TadA inserted into a Cas9. Exemplary sequences of ABEs having a TadA inserted into a Cas9 protein are described in International PCT Application No. PCT/US2020/048586, filed Aug. 28, 2020, the contents of which are incorporated by reference herein in their entirety.

Cas9 Domains with Reduced Exclusivity

[0566] Typically, Cas9 proteins, such as Cas9 from S. pyogenes (spCas9), require a canonical NGG PAM sequence to bind a particular nucleic acid region, where the “N” in “NGG” is adenosine (A), thymidine (T), or cytosine (C), and the G is guanosine. This may limit the ability to edit desired bases within a genome. In some embodiments, the base editing fusion proteins provided herein may need to be placed at a precise location, for example a region comprising a target base that is upstream of the PAM. See e.g., Komor, A. C., et al., “Programmable editing of a target base in genomic DNA without double-stranded DNA cleavage” Nature 533, 420-424 (2016), the entire contents of which are hereby incorporated by reference. Accordingly, in some embodiments, any of the fusion proteins provided herein may contain a Cas9 domain that is capable of binding a nucleotide sequence that does not contain a canonical (e.g., NGG) PAM sequence. Cas9 domains that bind to non-canonical PAM sequences have been described in the art and would be apparent to the skilled artisan. For example, Cas9 domains that bind non-canonical PAM sequences have been described in Kleinstiver, B. P., et al., “Engineered CRISPR-Cas9 nucleases with altered PAM specificities” Nature 523, 481-485 (2015); and Kleinstiver, B. P., et al., “Broadening the targeting range of Staphylococcus aureus CRISPR-Cas9 by modifying PAM recognition” Nature Biotechnology 33, 1293-1298 (2015); Nishimasu, H., et al., “Engineered CRISPR-Cas9 nuclease with expanded targeting space” Science. 2018 Sep. 21; 361(6408):1259-1262, Chatterjee, P., et al., Minimal PAM specificity of a highly similar SpCas9 ortholog” Sci Adv. 2018 Oct. 24; 4(10):eaau0766. doi: 10.1126/sciadv.aau0766, the entire contents of each are hereby incorporated by reference.

### Nucleobase Editing Domain

[0567] Described herein are base editors comprising a fusion protein that includes a polynucleotide programmable nucleotide binding domain and a nucleobase editing domain (e.g., a deaminase domain). The base editor can be programmed to edit one or more bases in a target polynucleotide sequence by interacting with a guide polynucleotide capable of recognizing the target sequence. Once the target sequence has been recognized, the base editor is anchored on the polynucleotide where editing is to occur and the deaminase domain components of the base editor can then edit a target base.

[0568] In some embodiments, the nucleobase editing domain includes a deaminase domain. In some embodiments, base editors include cytidine base editors (e.g., BE4) that convert target CG base pairs to TA. In some embodiments, base editors include adenine base editors (e.g., ABE7.10) that convert A•T to GC. As particularly described herein, the deaminase domain includes an adenosine deaminase. In some embodiments, the terms “adenine deaminase” and “adenosine deaminase” can be used interchangeably. Details of nucleobase editing proteins are described in International PCT Application Nos. PCT/2017/045381 (WO2018/027078) and PCT/US2016/058344 (WO2017/070632), each of which is incorporated herein by reference for its entirety. Also see Komor, A. C., et al., “Programmable editing of a target base in genomic DNA without double-stranded DNA cleavage” Nature 533, 420-424 (2016); Gaudelli, N. M., et al., “Programmable base editing of A•T to G•C in genomic DNA without DNA cleavage” Nature 551, 464-471 (2017); and Komor, A. C., et al., “Improved base excision repair inhibition and bacteriophage Mu Gam protein yields C:G-to-T:A base editors with higher efficiency and product purity” Science Advances 3:eaao4774 (2017), the entire contents of which are hereby incorporated by reference.

### A to G Editing

[0569] In some embodiments, a base editor described herein can comprise a deaminase domain which includes an adenosine deaminase. Such an adenosine deaminase domain of a base editor can facilitate the editing of an adenine (A) nucleobase to a guanine (G) nucleobase by deaminating the A to form inosine (I), which exhibits base pairing properties of G. Adenosine deaminase is capable of deaminating (i.e., removing an amine group) adenine of a deoxyadenosine residue in deoxyribonucleic acid (DNA).

[0570] In some embodiments, the nucleobase editors provided herein can be made by fusing together one or more protein domains, thereby generating a fusion protein. In certain embodiments, the fusion proteins provided herein comprise one or more features that improve the base editing activity (e.g., efficiency, selectivity, and specificity) of the fusion proteins. For example, the fusion proteins provided herein can comprise a Cas9 domain that has reduced nuclease activity. In some embodiments, the fusion proteins provided herein can have a Cas9 domain that does not have nuclease activity (dCas9), or a Cas9 domain that cuts one strand of a duplexed DNA molecule, referred to as a Cas9 nickase (nCas9). Without wishing to be bound by any particular theory, the presence of the catalytic residue (e.g., H840) maintains the activity of the Cas9 to cleave the non-edited (e.g., non-deaminated) strand containing a T opposite the targeted A. Mutation of the catalytic residue (e.g., D10 to A10) of Cas9 prevents cleavage of the edited strand containing the targeted A residue. Such Cas9 variants are able to generate a single-strand DNA break (nick) at a specific location based on the gRNA-defined target sequence, leading to repair of the non-edited strand, ultimately resulting in a T to C change on the non-edited strand. In some embodiments, an A-to-G base editor further comprises an inhibitor of inosine base excision repair, for example, a uracil glycosylase inhibitor (UGI) domain or a catalytically inactive inosine specific nuclease. Without wishing to be bound by any particular theory, the UGI domain or catalytically inactive inosine specific nuclease can inhibit or prevent base excision repair of a deaminated adenosine residue (e.g., inosine), which can improve the activity or efficiency of the base editor.

[0571] A base editor comprising an adenosine deaminase can act on any polynucleotide, including DNA, RNA and DNA-RNA hybrids. In certain embodiments, a base editor comprising an adenosine deaminase can deaminate a target A of a polynucleotide comprising RNA. For example, the base editor can comprise an adenosine deaminase domain capable of deaminating a target A of an RNA polynucleotide and/or a DNA-RNA hybrid polynucleotide. In an embodiment, an adenosine deaminase incorporated into a base editor comprises all or a portion of adenosine deaminase acting on RNA (ADAR, e.g., ADAR1 or ADAR2). In another embodiment, an adenosine deaminase incorporated into a base editor comprises all or a portion of adenosine deaminase acting on tRNA (ADAT). A base editor comprising an adenosine deaminase domain can also be capable of deaminating an A nucleobase of a DNA polynucleotide. In an embodiment an adenosine deaminase domain of a base editor comprises all or a portion of an ADAT comprising one or more mutations which permit the ADAT to deaminate a target A in DNA. For example, the base editor can comprise all or a portion of an ADAT from Escherichia coli (EcTadA) comprising one or more of the following mutations: D108N, A106V, D147Y, E155V, L84F, H123Y, I156F, or a corresponding mutation in another adenosine deaminase.

[0572] The adenosine deaminase can be derived from any suitable organism (e.g., E. coli). In some embodiments, the adenine deaminase is a naturally-occurring adenosine deaminase that includes one or more mutations corresponding to any of the mutations provided herein (e.g., mutations in ecTadA). The corresponding residue in any homologous protein can be identified by e.g., sequence alignment and determination of homologous residues. The mutations in any naturally-occurring adenosine deaminase (e.g., having homology to ecTadA) that corresponds to any of the mutations described herein (e.g., any of the mutations identified in ecTadA) can be generated accordingly.

### Adenosine Deaminases

[0573] In some embodiments, fusion proteins described herein can comprise a deaminase domain which includes an adenosine deaminase. Such an adenosine deaminase domain of a base editor can facilitate the editing of an adenine (A) nucleobase to a guanine (G) nucleobase by deaminating the A to form inosine (I), which exhibits base pairing properties of G. Adenosine deaminase is capable of deaminating (i.e., removing an amine group) adenine of a deoxyadenosine residue in deoxyribonucleic acid (DNA).

[0574] In some embodiments, the adenosine deaminases provided herein are capable of deaminating adenine. In some embodiments, the adenosine deaminases provided herein are capable of deaminating adenine in a deoxyadenosine residue of DNA. In some embodiments, the adenine deaminase is a naturally-occurring adenosine deaminase that includes one or more mutations corresponding to any of the mutations provided herein (e.g., mutations in ecTadA). One of skill in the art will be able to identify the corresponding residue in any homologous protein, e.g., by sequence alignment and determination of homologous residues. Accordingly, one of skill in the art would be able to generate mutations in any naturally-occurring adenosine deaminase (e.g., having homology to ecTadA) that corresponds to any of the mutations described herein, e.g., any of the mutations identified in ecTadA. In some embodiments, the adenosine deaminase is from a prokaryote. In some embodiments, the adenosine deaminase is from a bacterium. In some embodiments, the adenosine deaminase is from Escherichia coli, Staphylococcus aureus, Salmonella typhi, Shewanella putrefaciens, Haemophilus influenzae, Caulobacter crescentus, or Bacillus subtilis. In some embodiments, the adenosine deaminase is from E. coli.

[0575] The disclosure provides adenosine deaminase variants that have increased efficiency (>50-60%) and specificity. In particular, the adenosine deaminase variants described herein are more likely to edit a desired base within a polynucleotide, and are less likely to edit bases that are not intended to be altered (i.e., “bystanders”).

[0576] In particular embodiments, the TadA is any one of the TadA described in PCT/US2017/045381 (WO 2018/027078), which is incorporated herein by reference in its entirety. The wild-type TadA (TadA(wt)) or “the TadA reference sequence” is as follows:

MSEVEFSHEYWMRHALTLAKRAWDEREVPVGAVLVHNNRVIG
EGWNRPIGRHDPTAHAEIMALRQGGLVMQNYRLIDATLYVTL
EPCVMCAGAMIHSRIGRVVFGARDAKTGAAGSLMDVLHHPGM
NHRVEITEGILADECAALLSDFFRMRRQEIKAQKKAQSSTD

[0577] In some embodiments, the nucleobase editors of the disclosure are adenosine deaminase variants comprising an alteration in the following sequence:

MSEVEFSHEYWMRHALTLAKRARDEREVPVGAVLVLNNRVIG
EGWNRAIGLHDPTAHAEIMALRQGGLVMQNYRLIDATLYVTF
EPCVMCAGAMIHSRIGRVVFGVRNAKTGAAGSLMDVLHYPGM
NHRVEITEGILADECAALLCYFFRMPRQVFNAQKKAQSSTD
(also termed TadA*7.10).

[0578] In particular embodiments, the fusion proteins comprise a single (e.g., provided as a monomer) TadA*8 variant. In some embodiments, the TadA*8 is linked to a Cas9 nickase. In some embodiments, the fusion proteins of the disclosure comprise as a heterodimer of a wild-type TadA (TadA(wt)) linked to a TadA*8 variant. In other embodiments, the fusion proteins of the disclosure comprise as a heterodimer of a TadA*7.10 linked to a TadA*8 variant. In some embodiments, the base editor is ABE8 comprising a TadA*8 variant monomer. In some embodiments, the base editor is ABE8 comprising a heterodimer of a TadA*8 variant and a TadA(wt). In some embodiments, the base editor is ABE8 comprising a heterodimer of a TadA*8 variant and TadA*7.10. In some embodiments, the base editor is ABE8 comprising a heterodimer of a TadA*8 variant. In some embodiments, the TadA*8 variant is selected from one or more of Table 8, 10, 11, 12. or 13.

[0579] In some embodiments, the base editor is ABE9 comprising a TadA*9 variant. In some embodiments, the base editor is ABE9 comprising a TadA*9 variant monomer. In some embodiments, the base editor is ABE9 comprising a heterodimer of a TadA*9 variant and a TadA(wt). In some embodiments, the base editor is ABE9 comprising a heterodimer of a TadA*9 variant and another TadA variant (e.g., TadA*7.10). In some embodiments, the base editor is ABE9 comprising a homodimer of a TadA*9 variant. In some embodiments, the TadA*9 variant is as provided in Tables 14 and 18 herein. In some embodiments, the TadA*9 variant is selected from the variants described below and with reference to the following sequence (termed TadA*7.10):

```
                10 20 30
MSEVEFSHEY WMRHALTLAK RARDEREVPV
                40 50 60
GAVLVLNNRV IGEGWNRAIG LHDPTAHAEI
                70 80 90
MALRQGGLVM QNYRLIDATL YVTFEPCVMC
              100 110 120
AGAMIHSRIG RVVFGVRNAK TGAAGSLMDV
130 140 150
LHYPGMNHRV EITEGILADE CAALLCYFFR
              160
MPRQVFNAQK KAQSSTD.
```

[0580] In some embodiments, an adenosine deaminase (e.g., TadA*9) comprises an alteration at an amino acid position selected from the group consisting of 21, 23, 25, 38, 51, 54, 70, 71, 72, 73, 94, 124, 133, 139, 146, and 158 of SEQ ID NO: 1, or a corresponding alteration in another adenosine deaminase. In some embodiments, an adenosine deaminase (e.g., TadA*9) comprises one or more of the following alterations: R21N, R23H, E25F, N38G, L51W, P54C, M70V, Q71M, N72K, Y73S, V82T, M94V, P124W, T133K, D139L, D139M, C146R, and A158K, or a corresponding alteration in another adenosine deaminase. The relevant bases altered in the reference sequence are shown by underlining and bold font.

[0581] In some embodiments, an adenosine deaminase comprises one or more of the following combinations of alterations: V82S+Q154R+Y147R; V82S+Q154R+Y123H; V82S+Q154R+Y147R+Y123H; Q154R+Y147R+Y123H+I76Y+V82S; V82S+I76Y; V82S+Y147R; V82S+Y147R+Y123H; V82S+Q154R+Y123H; Q154R+Y147R+Y123H+I76Y; V82S+Y147R; V82S+Y147R+Y123H; V82S+Q154R+Y123H; V82S+Q154R+Y147R; V82S+Q154R+Y147R; Q154R+Y147R+Y123H+I76Y; Q154R+Y147R+Y123H+I76Y+V82S; I76Y V82S Y123H Y147R Q154R; Y147R+Q154R+H123H; and V82S+Q154R.

[0582] In some embodiments, an adenosine deaminase comprises one or more of the following combinations of alterations: E25F+V82S+Y123H, T133K+Y147R+Q154R; E25F+V82S+Y123H+Y147R+Q154R; L51W+V82S+Y123H+C146R+Y147R+Q154R; Y73S+V82S+Y123H+Y147R+Q154R; P54C+V82S+Y123H+Y147R+Q154R; N38G+V82T+Y123H+Y147R+Q154R; N72K+V82S+Y123H+D139L+Y147R+Q154R; E25F+V82S+Y123H+D139M+Y147R+Q154R; Q71M+V82S+Y123H+Y147R+Q154R; E25F+V82S+Y123H+T133K+Y147R+Q154R; E25F+V82S+Y123H+Y147R+Q154R; V82S+Y123H+P124W+Y147R+Q154R; L51W+V82S+Y123H+C146R+Y147R+Q154R; P54C+V82S+Y123H+Y147R+Q154R; Y73S+V82S+Y123H+Y147R+Q154R; N38G+V82T+Y123H+Y147R+Q154R; R23H+V82S+Y123H+Y147R+Q154R; R21N+V82S+Y123H+Y147R+Q154R; V82S+Y123H+Y147R+Q154R+A158K; N72K+V82S+Y123H+D139L+Y147R+Q154R; E25F+V82S+Y123H+D139M+Y147R+Q154R; and M70V+V82S+M94V+Y123H+Y147R+Q154R

[0583] In some embodiments, an adenosine deaminase comprises one or more of the following combinations of alterations: Q71M+V82S+Y123H+Y147R+Q154R; E25F+I76Y+V82S+Y123H+Y147R+Q154R; I76Y+V82T+Y123H+Y147R+Q154R; N38G+I76Y+V82S+Y123H+Y147R+Q154R; R23H+I76Y+V82S+Y123H+Y147R+Q154R; P54C+I76Y+V82S+Y123H+Y147R+Q154R; R21N+I76Y+V82S+Y123H+Y147R+Q154R; I76Y+V82S+Y123H+D139M+Y147R+Q154R; Y73S+I76Y+V82S+Y123H+Y147R+Q154R; E25F+I76Y+V82S+Y123H+Y147R+Q154R; I76Y+V82T+Y123H+Y147R+Q154R; N38G+I76Y+V82S+Y123H+Y147R+Q154R; R23H+I76Y+V82S+Y123H+Y147R+Q154R; P54C+I76Y+V82S+Y123H+Y147R+Q154R; R21N+I76Y+V82S+Y123H+Y147R+Q154R; I76Y+V82S+Y123H+D139M+Y147R+Q154R; Y73S+I76Y+V82S+Y123H+Y147R+Q154R; V82S+Q154R; N72K V82S+Y123H+Y147R+Q154R; Q71M V82S+Y123H+Y147R+Q154R; V82S+Y123H+T133K+Y147R+Q154R; V82S+Y123H+T133K+Y147R+Q154R+A158K; M70V+Q71M+N72K+V82S+Y123H+Y147R+Q154R; N72K+V82S+Y123H+Y147R+Q154R; Q71M V82S+Y123H+Y147R+Q154R; M70V+V82S+M94V+Y123H+Y147R+Q154R; V82S+Y123H+T133K+Y147R+Q154R; V82S+Y123H+T133K+Y147R+Q154R+A158K; and M70V+Q71M+N72K+V82S+Y123H+Y147R+Q154R. In some embodiments, the adenosine deaminase is expressed as a monomer. In other embodiments, the adenosine deaminase is expressed as a heterodimer. In some embodiments, the deaminase or other polypeptide sequence lacks a methionine, for example when included as a component of a fusion protein. This can alter the numbering of positions. However, the skilled person will understand that such corresponding mutations refer to the same mutation, e.g., Y73S and Y72S and D139M and D138M.

[0584] In some embodiments, the adenosine deaminase comprises an amino acid sequence that is at least 60%, at least 65%, at least 70%, at least 75%, at least 80%, at least 85%, at least 90%, at least 95%, at least 96%, at least 97%, at least 98%, at least 99%, or at least 99.5% identical to any one of the amino acid sequences set forth in any of the adenosine deaminases provided herein. It should be appreciated that adenosine deaminases provided herein may include one or more mutations (e.g., any of the mutations provided herein). The disclosure provides any deaminase domains with a certain percent identity plus any of the mutations or combinations thereof described herein. In some embodiments, the adenosine deaminase comprises an amino acid sequence that has 1, 2, 3, 4, 5, 6, 7, 8, 9, 10, 11, 12, 13, 14, 15, 16, 17, 18, 19, 20, 21, 22, 23, 24, 25, 26, 27, 28, 29, 30, 31, 32, 33, 34, 35, 36, 37, 38, 39, 40, 41, 42, 43, 44, 45, 46, 47, 48, 49, 50, or more mutations compared to a reference sequence, or any of the adenosine deaminases provided herein. In some embodiments, the adenosine deaminase comprises an amino acid sequence that has at least 5, at least 10, at least 15, at least 20, at least 25, at least 30, at least 35, at least 40, at least 45, at least 50, at least 60, at least 70, at least 80, at least 90, at least 100, at least 110, at least 120, at least 130, at least 140, at least 150, at least 160, or at least 170 identical contiguous amino acid residues as compared to any one of the amino acid sequences known in the art or described herein.

[0585] In some embodiments the TadA deaminase is a full-length E. coli TadA deaminase. For example, in certain embodiments, the adenosine deaminase comprises the amino acid sequence:

MRRAFITGVFFLSEVEFSHEYWMRHALTLAKRAWD
EREVPVGAVLVHNNRVIGEGWNRPIGRHDPTAHAE
IMALRQGGLVMQNYRLIDATLYVTLEPCVMCAGAM
IHSRIGRVVFGARDAKTGAAGSLMDVLHHPGMNHR
VEITEGILADECAALLSDFFRMRRQEIKAQKKAOS
STD.

[0586] It should be appreciated, however, that additional adenosine deaminases useful in the present application would be apparent to the skilled artisan and are within the scope of this disclosure. For example, the adenosine deaminase may be a homolog of adenosine deaminase acting on tRNA (ADAT). Without limitation, the amino acid sequences of exemplary AD AT homologs include the following:

Staphylococcus aureus TadA:

MGSHMTNDIYFMTLAIEEAKKAAQLGEVPIGAIIT
KDDEVIARAHNLRETLQQPTAHAEHIAIERAAKVL
GSWRLEGCTLYVTLEPCVMCAGTIVMSRIPRVVYG
ADDPKGGCSGSLMNLLQQSNFNHRAIVDKGVLKEA
CSTLLTTFFKNLRANKKSTN

Bacillus subtilis TadA:

MTQDELYMKEAIKEAKKAEEKGEVPIGAVLVINGE
IIARAHNLRETEQRSIAHAEMLVIDEACKALGTWR
LEGATLYVTLEPCPMCAGAVVLSRVEKVVFGAFDP
KGGCSGTLMNLLQEERFNHQAEVVSGVLEEECGGM
LSAFFRELRKKKKAARKNLSE

Salmonella typhimurium (S. typhimurium) TadA:

MPPAFITGVTSLSDVELDHEYWMRHALTLAKRAWD
EREVPVGAVLVHNHRVIGEGWNRPIGRHDPTAHAE
IMALRQGGLVLQNYRLLDTTLYVTLEPCVMCAGAM
VHSRIGRVVFGARDAKTGAAGSLIDVLHHPGMNHR
VEIIEGVLRDECATLLSDFFRMRRQEIKALKKADR
AEGAGPAV

Shewanella putrefaciens (S. putrefaciens) TadA:

MDEYWMQVAMQMAEKAEAAGEVPVGAVLVKDGQQI
ATGYNLSISQHDPTAHAEILCLRSAGKKLENYRLL
DATLYITLEPCAMCAGAMVHSRIARVVYGARDEKT
GAAGTVVNLLQHPAFNHQVEVTSGVLAEACSAQLS
RFFKRRRDEKKALKLAQRAQQGIE

Haemophilus influenzae F3031 (H. influenzae) TadA:

MDAAKVRSEEDEKMMRYALELADKAEALGEIPVGA
VLVDDARNIIGEGWNLSIVQSDPTAHAEIIALRNG
AKNIQNYRLLNSTLYVTLEPCTMCAGAILHSRIKR
LVFGASDYKTGAIGSRFHFFDDYKMNHTLEITSGV
LAEECSQKLSTFFQKRREEKKIEKALLKSLSDK

Caulobacter crescentus (C. crescentus) TadA:

MRTDESEDQDHRMMRLALDAARAAAEAGETPVGAV
ILDPSTGEVIATAGNGPIAAHDPTAHAEIAAMRAA
AAKLGNYRLTDLTLVVTLEPCAMCAGAISHARIGR
VVFGADDPKGGAVVHGPKFFAQPTCHWRPEVTGGV
LADESADLLRGFFRARRKAKI

Geobacter sulfurreducens (G. sulfurreducens) TadA:

MSSLKKTPIRDDAYWMGKAIREAAKAAARDEVPIG
AVIVRDGAVIGRGHNLREGSNDPSAHAEMIAIRQA
ARRSANWRLTGATLYVTLEPCLMCMGAIILARLER
VVFGCYDPKGGAAGSLYDLSADPRLNHQVRLSPGV
CQEECGTMLSDFFRDLRRRKKAKATPALFIDERKV
PPEP

An embodiment of E. Coli TadA (ecTadA) includes the following:

MSEVEFSHEYWMRHALTLAKRARDEREVPVGAVLV
LNNRVIGEGWNRAIGLHDPTAHAEIMALRQGGLVM
ONYRLIDATLYVTFEPCVMCAGAMIHSRIGRVVFG
VRNAKTGAAGSLMDVLHYPGMNHRVEITEGILADE
CAALLCYFFRMPRQVFNAQKKAQSSTD

[0587] In some embodiments, the adenosine deaminase is from a prokaryote. In some embodiments, the adenosine deaminase is from a bacterium. In some embodiments, the adenosine deaminase is from Escherichia coli, Staphylococcus aureus, Salmonella typhi, Shewanella putrefaciens, Haemophilus influenzae, Caulobacter crescentus, or Bacillus subtilis. In some embodiments, the adenosine deaminase is from E. coli.

[0588] In one embodiment, a fusion protein of the disclosure comprises a wild-type TadA linked to TadA*7.10, which is linked to Cas9 nickase. In particular embodiments, the fusion proteins comprise a single TadA*7.10 domain (e.g., provided as a monomer). In other embodiments, the ABE7.10 editor comprises TadA*7.10 and TadA(wt), which are capable of forming heterodimers.

[0589] In some embodiments, the adenosine deaminase comprises an amino acid sequence that is at least 60%, at least 65%, at least 70%, at least 75%, at least 80%, at least 85%, at least 90%, at least 95%, at least 96%, at least 97%, at least 98%, at least 99%, or at least 99.5% identical to any one of the amino acid sequences set forth in any of the adenosine deaminases provided herein. It should be appreciated that adenosine deaminases provided herein may include one or more mutations (e.g., any of the mutations provided herein). The disclosure provides any deaminase domains with a certain percent identity plus any of the mutations or combinations thereof described herein. In some embodiments, the adenosine deaminase comprises an amino acid sequence that has 1, 2, 3, 4, 5, 6, 7, 8, 9, 10, 11, 12, 13, 14, 15, 16, 17, 18, 19, 20, 21, 22, 23, 24, 25, 26, 27, 28, 29, 30, 31, 32, 33, 34, 35, 36, 37, 38, 39, 40, 41, 42, 43, 44, 45, 46, 47, 48, 49, 50, or more mutations compared to a reference sequence, or any of the adenosine deaminases provided herein. In some embodiments, the adenosine deaminase comprises an amino acid sequence that has at least 5, at least 10, at least 15, at least 20, at least 25, at least 30, at least 35, at least 40, at least 45, at least 50, at least 60, at least 70, at least 80, at least 90, at least 100, at least 110, at least 120, at least 130, at least 140, at least 150, at least 160, or at least 170 identical contiguous amino acid residues as compared to any one of the amino acid sequences known in the art or described herein.

[0590] It should be appreciated that any of the mutations provided herein (e.g., based on the TadA reference sequence) can be introduced into other adenosine deaminases, such as E. coli TadA (ecTadA), S. aureus TadA (saTadA), or other adenosine deaminases (e.g., bacterial adenosine deaminases). It would be apparent to the skilled artisan that additional deaminases may similarly be aligned to identify homologous amino acid residues that can be mutated as provided herein. Thus, any of the mutations identified in the TadA reference sequence can be made in other adenosine deaminases (e.g., ecTada) that have homologous amino acid residues. It should also be appreciated that any of the mutations provided herein can be made individually or in any combination in the TadA reference sequence or another adenosine deaminase.

[0591] In some embodiments, the adenosine deaminase comprises a D108X mutation in the TadA reference sequence, or a corresponding mutation in another adenosine deaminase (e.g., ecTadA), where X indicates any amino acid other than the corresponding amino acid in the wild-type adenosine deaminase. In some embodiments, the adenosine deaminase comprises a D108G, D108N, D108V, D108A, or D108Y mutation, or a corresponding mutation in another adenosine deaminase.

[0592] In some embodiments, the adenosine deaminase comprises an A106X mutation in TadA reference sequence, or a corresponding mutation in another adenosine deaminase (e.g., ecTadA), where X indicates any amino acid other than the corresponding amino acid in the wild-type adenosine deaminase. In some embodiments, the adenosine deaminase comprises an A106V mutation in TadA reference sequence, or a corresponding mutation in another adenosine deaminase (e.g., wild type TadA or ecTadA).

[0593] In some embodiments, the adenosine deaminase comprises a E155X mutation in TadA reference sequence, or a corresponding mutation in another adenosine deaminase (e.g., ecTadA), where the presence of X indicates any amino acid other than the corresponding amino acid in the wild-type adenosine deaminase. In some embodiments, the adenosine deaminase comprises a E155D, E155G, or E155V mutation in TadA reference sequence, or a corresponding mutation in another adenosine deaminase (e.g., ecTadA).

[0594] In some embodiments, the adenosine deaminase comprises a D147X mutation in TadA reference sequence, or a corresponding mutation in another adenosine deaminase (e.g., ecTadA), where the presence of X indicates any amino acid other than the corresponding amino acid in the wild-type adenosine deaminase. In some embodiments, the adenosine deaminase comprises a D147Y, mutation in TadA reference sequence, or a corresponding mutation in another adenosine deaminase (e.g., ecTadA).

[0595] In some embodiments, the adenosine deaminase comprises an A106X, E155X, or D147X, mutation in the TadA reference sequence, or a corresponding mutation in another adenosine deaminase (e.g., ecTadA), where X indicates any amino acid other than the corresponding amino acid in the wild-type adenosine deaminase. In some embodiments, the adenosine deaminase comprises an E155D, E155G, or E155V mutation. In some embodiments, the adenosine deaminase comprises a D147Y.

[0596] For example, an adenosine deaminase can contain a D108N, a A106V, a E155V, and/or a D147Y mutation in TadA reference sequence, or a corresponding mutation in another adenosine deaminase (e.g., ecTadA). In some embodiments, an adenosine deaminase comprises the following group of mutations (groups of mutations are separated by a “;”) in TadA reference sequence, or corresponding mutations in another adenosine deaminase (e.g., ecTadA): D108N and A106V; D108N and E155V; D108N and D147Y; A106V and E155V; A106V and D147Y; E155V and D147Y; D108N, A106V, and E155V; D108N, A106V, and D147Y; D108N, E155V, and D147Y; A106V, E155V, and D147Y; and D108N, A106V, E155V, and D147Y. It should be appreciated, however, that any combination of corresponding mutations provided herein can be made in an adenosine deaminase (e.g., ecTadA).

[0597] In some embodiments, the adenosine deaminase comprises one or more of a H8X, T17X, L18X, W23X, L34X, W45X, R51X, A56X, E59X, E85X, M94X, I95X, V102X, F104X, A106X, R107X, D108X, K110X, M118X, N127X, A138X, F149X, M151X, R153X, Q154X, I156X, and/or K157X mutation in TadA reference sequence, or one or more corresponding mutations in another adenosine deaminase (e.g., ecTadA), where the presence of X indicates any amino acid other than the corresponding amino acid in the wild-type adenosine deaminase. In some embodiments, the adenosine deaminase comprises one or more of H8Y, T17S, L18E, W23L, L34S, W45L, R51H, A56E, or A56S, E59G, E85K, or E85G, M94L, I95L, V102A, F104L, A106V, R107C, or R107H, or R107P, D108G, or D108N, or D108V, or D108A, or D108Y, K110I, M118K, N127S, A138V, F149Y, M151V, R153C, Q154L, I156D, and/or K157R mutation in TadA reference sequence, or one or more corresponding mutations in another adenosine deaminase (e.g., ecTadA).

[0598] In some embodiments, the adenosine deaminase comprises one or more of a H8X, D108X, and/or N127X mutation in TadA reference sequence, or one or more corresponding mutations in another adenosine deaminase (e.g., ecTadA), where X indicates the presence of any amino acid. In some embodiments, the adenosine deaminase comprises one or more of a H8Y, D108N, and/or N127S mutation in TadA reference sequence, or one or more corresponding mutations in another adenosine deaminase (e.g., ecTadA).

[0599] In some embodiments, the adenosine deaminase comprises one or more of H8X, R26X, M61X, L68X, M70X, A106X, D108X, A109X, N127X, D147X, R152X, Q154X, E155X, K161X, Q163X, and/or T166X mutation in TadA reference sequence, or one or more corresponding mutations in another adenosine deaminase (e.g., ecTadA), where X indicates the presence of any amino acid other than the corresponding amino acid in the wild-type adenosine deaminase. In some embodiments, the adenosine deaminase comprises one or more of H8Y, R26W, M611, L68Q, M70V, A106T, D108N, A109T, N127S, D147Y, R152C, Q154H or Q154R, E155G or E155V or E155D, K161Q, Q163H, and/or T166P mutation in TadA reference sequence, or one or more corresponding mutations in another adenosine deaminase (e.g., ecTadA).

[0600] In some embodiments, the adenosine deaminase comprises one, two, three, four, five, or six mutations selected from the group consisting of H8X, D108X, N127X, D147X, R152X, and Q154X in TadA reference sequence, or a corresponding mutation or mutations in another adenosine deaminase (e.g., ecTadA), where X indicates the presence of any amino acid other than the corresponding amino acid in the wild-type adenosine deaminase. In some embodiments, the adenosine deaminase comprises one, two, three, four, five, six, seven, or eight mutations selected from the group consisting of H8X, M61X, M70X, D108X, N127X, Q154X, E155X, and Q163X in TadA reference sequence, or a corresponding mutation or mutations in another adenosine deaminase (e.g., ecTadA), where X indicates the presence of any amino acid other than the corresponding amino acid in the wild-type adenosine deaminase. In some embodiments, the adenosine deaminase comprises one, two, three, four, or five, mutations selected from the group consisting of H8X, D108X, N127X, E155X, and T166X in TadA reference sequence, or a corresponding mutation or mutations in another adenosine deaminase (e.g., ecTadA), where X indicates the presence of any amino acid other than the corresponding amino acid in the wild-type adenosine deaminase.

[0601] In some embodiments, the adenosine deaminase comprises one, two, three, four, five, or six mutations selected from the group consisting of H8X, A106X and D108X, or a corresponding mutation or mutations in another adenosine deaminase, where X indicates the presence of any amino acid other than the corresponding amino acid in the wild-type adenosine deaminase. In some embodiments, the adenosine deaminase comprises one, two, three, four, five, six, seven, or eight mutations selected from the group consisting of H8X, R26X, L68X, D108X, N127X, D147X, and E155X, or a corresponding mutation or mutations in another adenosine deaminase, where X indicates the presence of any amino acid other than the corresponding amino acid in the wild-type adenosine deaminase.

[0602] In some embodiments, the adenosine deaminase comprises one, two, three, four, five, six, or seven mutations selected from the group consisting of H8X, R126X, L68X, D108X, N127X, D147X, and E155X in TadA reference sequence, or a corresponding mutation or mutations in another adenosine deaminase, where X indicates the presence of any amino acid other than the corresponding amino acid in the wild-type adenosine deaminase. In some embodiments, the adenosine deaminase comprises one, two, three, four, or five mutations selected from the group consisting of H8X, D108X, A109X, N127X, and E155X in TadA reference sequence, or a corresponding mutation or mutations in another adenosine deaminase, where X indicates the presence of any amino acid other than the corresponding amino acid in the wild-type adenosine deaminase.

[0603] In some embodiments, the adenosine deaminase comprises one, two, three, four, five, or six mutations selected from the group consisting of H8Y, D108N, N127S, D147Y, R152C, and Q154H in TadA reference sequence, or a corresponding mutation or mutations in another adenosine deaminase (e.g., ecTadA). In some embodiments, the adenosine deaminase comprises one, two, three, four, five, six, seven, or eight mutations selected from the group consisting of H8Y, M611, M70V, D108N, N127S, Q154R, E155G and Q163H in TadA reference sequence, or a corresponding mutation or mutations in another adenosine deaminase (e.g., ecTadA). In some embodiments, the adenosine deaminase comprises one, two, three, four, or five, mutations selected from the group consisting of H8Y, D108N, N127S, E155V, and T166P in TadA reference sequence, or a corresponding mutation or mutations in another adenosine deaminase (e.g., ecTadA). In some embodiments, the adenosine deaminase comprises one, two, three, four, five, or six mutations selected from the group consisting of H8Y, A106T, D108N, N127S, E155D, and K161Q in TadA reference sequence, or a corresponding mutation or mutations in another adenosine deaminase (e.g., ecTadA). In some embodiments, the adenosine deaminase comprises one, two, three, four, five, six, seven, or eight mutations selected from the group consisting of H8Y, R26W, L68Q, D108N, N127S, D147Y, and E155V in TadA reference sequence, or a corresponding mutation or mutations in another adenosine deaminase (e.g., ecTadA). In some embodiments, the adenosine deaminase comprises one, two, three, four, or five, mutations selected from the group consisting of H8Y, D108N, A109T, N127S, and E155G in TadA reference sequence, or a corresponding mutation or mutations in another adenosine deaminase (e.g., ecTadA).

[0604] Any of the mutations provided herein and any additional mutations (e.g., based on the ecTadA amino acid sequence) can be introduced into any other adenosine deaminases. Any of the mutations provided herein can be made individually or in any combination in TadA reference sequence or another adenosine deaminase (e.g., ecTadA).

[0605] Details of A to G nucleobase editing proteins are described in International PCT Application No. PCT/2017/045381 (WO2018/027078) and Gaudelli, N. M., et al., “Programmable base editing of A•T to G•C in genomic DNA without DNA cleavage” Nature, 551, 464-471 (2017), the entire contents of which are hereby incorporated by reference.

[0606] In some embodiments, the adenosine deaminase comprises one or more corresponding mutations in another adenosine deaminase (e.g., ecTadA). In some embodiments, the adenosine deaminase comprises a D108N, D108G, or D108V mutation in TadA reference sequence, or corresponding mutations in another adenosine deaminase (e.g., ecTadA). In some embodiments, the adenosine deaminase comprises a A106V and D108N mutation in TadA reference sequence, or corresponding mutations in another adenosine deaminase (e.g., ecTadA). In some embodiments, the adenosine deaminase comprises R107C and D108N mutations in TadA reference sequence, or corresponding mutations in another adenosine deaminase (e.g., ecTadA). In some embodiments, the adenosine deaminase comprises a H8Y, D108N, N127S, D147Y, and Q154H mutation in TadA reference sequence, or corresponding mutations in another adenosine deaminase (e.g., ecTadA). In some embodiments, the adenosine deaminase comprises a H8Y, D108N, N127S, D147Y, and E155V mutation in TadA reference sequence, or corresponding mutations in another adenosine deaminase (e.g., ecTadA). In some embodiments, the adenosine deaminase comprises a D108N, D147Y, and E155V mutation in TadA reference sequence, or corresponding mutations in another adenosine deaminase (e.g., ecTadA). In some embodiments, the adenosine deaminase comprises a H8Y, D108N, and N127S mutation in TadA reference sequence, or corresponding mutations in another adenosine deaminase (e.g., ecTadA). In some embodiments, the adenosine deaminase comprises a A106V, D108N, D147Y and E155V mutation in TadA reference sequence, or corresponding mutations in another adenosine deaminase (e.g., ecTadA).

[0607] In some embodiments, the adenosine deaminase comprises one or more of a S2X, H8X, I49X, L84X, H123X, N127X, I156X and/or K160X mutation in TadA reference sequence, or one or more corresponding mutations in another adenosine deaminase, where the presence of X indicates any amino acid other than the corresponding amino acid in the wild-type adenosine deaminase. In some embodiments, the adenosine deaminase comprises one or more of S2A, H8Y, I49F, L84F, H123Y, N127S, I156F and/or K160S mutation in TadA reference sequence, or one or more corresponding mutations in another adenosine deaminase (e.g., ecTadA).

[0608] In some embodiments, the adenosine deaminase comprises an L84X mutation adenosine deaminase, where X indicates any amino acid other than the corresponding amino acid in the wild-type adenosine deaminase. In some embodiments, the adenosine deaminase comprises an L84F mutation in TadA reference sequence, or a corresponding mutation in another adenosine deaminase (e.g., ecTadA).

[0609] In some embodiments, the adenosine deaminase comprises an H123X mutation in TadA reference sequence, or a corresponding mutation in another adenosine deaminase (e.g., ecTadA), where X indicates any amino acid other than the corresponding amino acid in the wild-type adenosine deaminase. In some embodiments, the adenosine deaminase comprises an H123Y mutation in TadA reference sequence, or a corresponding mutation in another adenosine deaminase (e.g., ecTadA).

[0610] In some embodiments, the adenosine deaminase comprises an I156X mutation in TadA reference sequence, or a corresponding mutation in another adenosine deaminase (e.g., ecTadA), where X indicates any amino acid other than the corresponding amino acid in the wild-type adenosine deaminase. In some embodiments, the adenosine deaminase comprises an I156F mutation in TadA reference sequence, or a corresponding mutation in another adenosine deaminase (e.g., ecTadA).

[0611] In some embodiments, the adenosine deaminase comprises one, two, three, four, five, six, or seven mutations selected from the group consisting of L84X, A106X, D108X, H123X, D147X, E155X, and I156X in TadA reference sequence, or a corresponding mutation or mutations in another adenosine deaminase (e.g., ecTadA), where X indicates the presence of any amino acid other than the corresponding amino acid in the wild-type adenosine deaminase. In some embodiments, the adenosine deaminase comprises one, two, three, four, five, or six mutations selected from the group consisting of S2X, I49X, A106X, D108X, D147X, and E155X in TadA reference sequence, or a corresponding mutation or mutations in another adenosine deaminase (e.g., ecTadA), where X indicates the presence of any amino acid other than the corresponding amino acid in the wild-type adenosine deaminase. In some embodiments, the adenosine deaminase comprises one, two, three, four, or five, mutations selected from the group consisting of H8X, A106X, D108X, N127X, and K160X in TadA reference sequence, or a corresponding mutation or mutations in another adenosine deaminase (e.g., ecTadA), where X indicates the presence of any amino acid other than the corresponding amino acid in the wild-type adenosine deaminase.

[0612] In some embodiments, the adenosine deaminase comprises one, two, three, four, five, six, or seven mutations selected from the group consisting of L84F, A106V, D108N, H123Y, D147Y, E155V, and I156F in TadA reference sequence, or a corresponding mutation or mutations in another adenosine deaminase (e.g., ecTadA). In some embodiments, the adenosine deaminase comprises one, two, three, four, five, or six mutations selected from the group consisting of S2A, I49F, A106V, D108N, D147Y, and E155V in TadA reference sequence.

[0613] In some embodiments, the adenosine deaminase comprises one, two, three, four, or five, mutations selected from the group consisting of H8Y, A106T, D108N, N127S, and K160S in TadA reference sequence, or a corresponding mutation or mutations in another adenosine deaminase (e.g., ecTadA).

[0614] In some embodiments, the adenosine deaminase comprises one or more of a E25X, R26X, R107X, A142X, and/or A143X mutation in TadA reference sequence, or one or more corresponding mutations in another adenosine deaminase (e.g., ecTadA), where the presence of X indicates any amino acid other than the corresponding amino acid in the wild-type adenosine deaminase. In some embodiments, the adenosine deaminase comprises one or more of E25M, E25D, E25A, E25R, E25V, E25S, E25Y, R26G, R26N, R26Q, R26C, R26L, R26K, R107P, R107K, R107A, R107N, R107W, R107H, R107S, A142N, A142D, A142G, A143D, A143G, A143E, A143L, A143W, A143M, A143S, A143Q and/or A143R mutation in TadA reference sequence, or one or more corresponding mutations in another adenosine deaminase (e.g., ecTadA). In some embodiments, the adenosine deaminase comprises one or more of the mutations described herein corresponding to TadA reference sequence, or one or more corresponding mutations in another adenosine deaminase (e.g., ecTadA).

[0615] In some embodiments, the adenosine deaminase comprises an E25X mutation in TadA reference sequence, or a corresponding mutation in another adenosine deaminase (e.g., ecTadA), where X indicates any amino acid other than the corresponding amino acid in the wild-type adenosine deaminase. In some embodiments, the adenosine deaminase comprises an E25M, E25D, E25A, E25R, E25V, E25S, or E25Y mutation in TadA reference sequence, or a corresponding mutation in another adenosine deaminase (e.g., ecTadA).

[0616] In some embodiments, the adenosine deaminase comprises an R26X mutation in TadA reference sequence, or a corresponding mutation in another adenosine deaminase (e.g., ecTadA), where X indicates any amino acid other than the corresponding amino acid in the wild-type adenosine deaminase. In some embodiments, the adenosine deaminase comprises R26G, R26N, R26Q, R26C, R26L, or R26K mutation in TadA reference sequence, or a corresponding mutation in another adenosine deaminase (e.g., ecTadA).

[0617] In some embodiments, the adenosine deaminase comprises an R107X mutation in TadA reference sequence, or a corresponding mutation in another adenosine deaminase (e.g., ecTadA), where X indicates any amino acid other than the corresponding amino acid in the wild-type adenosine deaminase. In some embodiments, the adenosine deaminase comprises an R107P, R107K, R107A, R107N, R107W, R107H, or R107S mutation in TadA reference sequence, or a corresponding mutation in another adenosine deaminase (e.g., ecTadA).

[0618] In some embodiments, the adenosine deaminase comprises an A142X mutation in TadA reference sequence, or a corresponding mutation in another adenosine deaminase (e.g., ecTadA), where X indicates any amino acid other than the corresponding amino acid in the wild-type adenosine deaminase. In some embodiments, the adenosine deaminase comprises an A142N, A142D, A142G, mutation in TadA reference sequence, or a corresponding mutation in another adenosine deaminase (e.g., ecTadA).

[0619] In some embodiments, the adenosine deaminase comprises an A143X mutation in TadA reference sequence, or a corresponding mutation in another adenosine deaminase (e.g., ecTadA), where X indicates any amino acid other than the corresponding amino acid in the wild-type adenosine deaminase. In some embodiments, the adenosine deaminase comprises an A143D, A143G, A143E, A143L, A143W, A143M, A143S, A143Q and/or A143R mutation in TadA reference sequence, or a corresponding mutation in another adenosine deaminase (e.g., ecTadA).

[0620] In some embodiments, the adenosine deaminase comprises one or more of a H36X, N37X, P48X, I49X, R51X, M70X, N72X, D77X, E134X, S146X, Q154X, K157X, and/or K161X mutation in TadA reference sequence, or one or more corresponding mutations in another adenosine deaminase (e.g., ecTadA), where the presence of X indicates any amino acid other than the corresponding amino acid in the wild-type adenosine deaminase. In some embodiments, the adenosine deaminase comprises one or more of H36L, N37T, N37S, P48T, P48L, I49V, R51H, R51L, M70L, N72S, D77G, E134G, S146R, S146C, Q154H, K157N, and/or K161T mutation in TadA reference sequence, or one or more corresponding mutations in another adenosine deaminase (e.g., ecTadA).

[0621] In some embodiments, the adenosine deaminase comprises an H36X mutation in TadA reference sequence, or a corresponding mutation in another adenosine deaminase (e.g., ecTadA), where X indicates any amino acid other than the corresponding amino acid in the wild-type adenosine deaminase. In some embodiments, the adenosine deaminase comprises an H36L mutation in TadA reference sequence, or a corresponding mutation in another adenosine deaminase (e.g., ecTadA).

[0622] In some embodiments, the adenosine deaminase comprises an N37X mutation in TadA reference sequence, or a corresponding mutation in another adenosine deaminase (e.g., ecTadA), where X indicates any amino acid other than the corresponding amino acid in the wild-type adenosine deaminase. In some embodiments, the adenosine deaminase comprises an N37T, or N37S mutation in TadA reference sequence, or a corresponding mutation in another adenosine deaminase (e.g., ecTadA).

[0623] In some embodiments, the adenosine deaminase comprises an P48X mutation in TadA reference sequence, or a corresponding mutation in another adenosine deaminase (e.g., ecTadA), where X indicates any amino acid other than the corresponding amino acid in the wild-type adenosine deaminase. In some embodiments, the adenosine deaminase comprises an P48T, or P48L mutation in TadA reference sequence, or a corresponding mutation in another adenosine deaminase (e.g., ecTadA).

[0624] In some embodiments, the adenosine deaminase comprises an R51X mutation in TadA reference sequence, or a corresponding mutation in another adenosine deaminase, where X indicates any amino acid other than the corresponding amino acid in the wild-type adenosine deaminase. In some embodiments, the adenosine deaminase comprises an R51H, or R51L mutation in TadA reference sequence, or a corresponding mutation in another adenosine deaminase (e.g., ecTadA).

[0625] In some embodiments, the adenosine deaminase comprises an S146X mutation in TadA reference sequence, or a corresponding mutation in another adenosine deaminase (e.g., ecTadA), where X indicates any amino acid other than the corresponding amino acid in the wild-type adenosine deaminase. In some embodiments, the adenosine deaminase comprises an S146R, or S146C mutation in TadA reference sequence, or a corresponding mutation in another adenosine deaminase (e.g., ecTadA).

[0626] In some embodiments, the adenosine deaminase comprises an K157X mutation in TadA reference sequence, or a corresponding mutation in another adenosine deaminase (e.g., ecTadA), where X indicates any amino acid other than the corresponding amino acid in the wild-type adenosine deaminase. In some embodiments, the adenosine deaminase comprises a K157N mutation in TadA reference sequence, or a corresponding mutation in another adenosine deaminase (e.g., ecTadA).

[0627] In some embodiments, the adenosine deaminase comprises an P48X mutation in TadA reference sequence, or a corresponding mutation in another adenosine deaminase (e.g., ecTadA), where X indicates any amino acid other than the corresponding amino acid in the wild-type adenosine deaminase. In some embodiments, the adenosine deaminase comprises a P48S, P48T, or P48A mutation in TadA reference sequence, or a corresponding mutation in another adenosine deaminase (e.g., ecTadA).

[0628] In some embodiments, the adenosine deaminase comprises an A142X mutation in TadA reference sequence, or a corresponding mutation in another adenosine deaminase (e.g., ecTadA), where X indicates any amino acid other than the corresponding amino acid in the wild-type adenosine deaminase. In some embodiments, the adenosine deaminase comprises a A142N mutation in TadA reference sequence, or a corresponding mutation in another adenosine deaminase (e.g., ecTadA).

[0629] In some embodiments, the adenosine deaminase comprises an W23X mutation in TadA reference sequence, or a corresponding mutation in another adenosine deaminase (e.g., ecTadA), where X indicates any amino acid other than the corresponding amino acid in the wild-type adenosine deaminase. In some embodiments, the adenosine deaminase comprises a W23R, or W23L mutation in TadA reference sequence, or a corresponding mutation in another adenosine deaminase (e.g., ecTadA).

[0630] In some embodiments, the adenosine deaminase comprises an R152X mutation in TadA reference sequence, or a corresponding mutation in another adenosine deaminase (e.g., ecTadA), where X indicates any amino acid other than the corresponding amino acid in the wild-type adenosine deaminase. In some embodiments, the adenosine deaminase comprises a R152P, or R52H mutation in TadA reference sequence, or a corresponding mutation in another adenosine deaminase (e.g., ecTadA).

[0631] In one embodiment, the adenosine deaminase may comprise the mutations H36L, R51L, L84F, A106V, D108N, H123Y, S146C, D147Y, E155V, I156F, and K157N. In some embodiments, the adenosine deaminase comprises the following combination of mutations relative to TadA reference sequence, where each mutation of a combination is separated by a “_” and each combination of mutations is between parentheses:

### (A106V_D108N),

### (R107C_D108N),

### (H8Y_D108NN127S_D147Y_Q154H),

### (H8Y_D108NN127S_D147Y_E155V),

### (D108N_D147Y_E155V),

### (H8Y_D108N_N127S),

### (H8Y_D108NN127S_D147Y_Q154H),

### (A106V_D108N_D147Y_E155V),

### (D108Q_D147Y_E155V),

### (D108M_D147Y_E155V),

### (D108L_D147Y_E155V),

### (D108K_D147Y_E155V),

### (D108I_D147Y_E155V),

### (D108F_D147Y_E155V),

### (A106V_D108N_D147Y),

### (A106V_D108M_D147Y_E155V),

### (E59A_A106V_D108N_D147Y_E155V),

[0632] (E59A cat dead_A_106V_D108N_D147Y_E155V),

### (L84F_A106V_D108N_H123Y_D147Y_E155V_I156 Y),

### (L84F_A106V_D108N_H123Y_D147Y_E155V_I156F),

### (D103A_D104N),

### (G22P_D103A_D104N),

### (D103A_D104N_S138A),

### (R26G_L84F_A106V_R107H_D108N_H123Y_A142N_A143D_D147Y_E155V_I156F),

### (E25G_R26G_L84F_A106V_R107H_D108N_H123Y_A142N_A143D_D147Y_E155V_I156F), (E25D_R26G_L84F_A106V_R107K_D108N_H123Y_A142N_A143G_D147Y_E155V_I156F),

### (R26Q_L84F_A106V_D108N_H123Y_A142N_D147Y_E155V_I156F),

### (E25M_R26G_L84F_A106V_R107P_D108N_H123Y_A142N_A143D_D147Y_E155V_I156F),

### (R26C_L84F_A106V_R107H_D108N_H123Y_A142N_D147Y_E155V_I156F),

### (L84F_A106V_D108N_H123Y_A142N_A143L_D147Y_E155V_I156F),

### (R26G_L84F_A106V_D108N_H123Y_A142N_D147Y_E155V_I156F),

### (E25A_R26G_L84F_A106V_R107N_D108N_H123Y_A142N_A143E_D147Y_E155V_I156F),

### (R26G_L84F_A106V_R107H_D108N_H123Y_A142N_A143D_D147Y_E155V_I156F),

### (A106V_D108N_A142N_D147Y_E155V),

### (R26G_A106V_D108N_A142N_D147Y_E155V),

### (E25D_R26G_A106V_R107K_D108N_A142N_A143G_D147Y_E155V),

### (R26G_A106V_D108N_R107H_A142N_A143D_D147Y_E155V),

### (E25D_R26G_A106V_D108N_A142N_D147Y_E155V),

### (A106V_R107K_D108N_A142N_D147Y_E155V),

### (A106V_D108N_A142N_A143G_D147Y_E155V),

### (A106V_D108N_A142N_A143L_D147Y_E155V),

### (H36L_R51L_L84F_A106V_D108N_H123Y_S146C_D147Y_E155V_I156F_K157N),

### (N37T_P48T_M70L_L84F_A106V_D108N_H123Y_D147Y_I49V_E155V_I156F),

### (N37S_L84F_A106V_D108N_H123Y_D147Y_E155V_I156F_K161T),

### (H36L_L84F_A106V_D108N_H123Y_D147Y_Q154H_E155V_I156F),

### (N72S_L84F_A106V_D108N_H123Y_S146R_D147Y_E155V_I156F),

### (H36L_P48L_L84F_A106V_D108N_H123Y_E134G_D147Y_E155V_I156F),

### (H36L_L84F_A106V_D108N_H123Y_D147Y_E155V_I156F_K157N),

### (H36L_L84F_A106V_D108N_H123Y_S146C_D147Y_E155V_I156F),

### (L84F_A106V_D108N_H123Y_S146R_D147Y_E155V_I156F_K161T),

### (N37S_R51H_D77G_L84F_A106V_D108N_H123Y_D147Y_E155V_I156F),

### (R51L_L84F_A106V_D108N_H123Y_D147Y_E155V_I156F_K157N),

### (D24G_Q71R_L84F_H96L_A106V_D108N_H123Y_D147Y_E155V_I156F_K160E),

### (H36L_G67V_L84F_A106V_D108N_H123Y_S146T_D147Y_E155V_I156F),

### (Q71L_L84F_A106V_D108N_H123Y_L137M_A143E_D147Y_E155V_I156F),

### (E25G_L84F_A106V_D108N_H123Y_D147Y_E155V_I156F_Q159L),

### (L84F_A91T_F104I_A106V_D108N_H123Y_D147Y_E155V_I156F),

### (N72D_L84F_A106V_D108N_H123Y_G125A_D147Y_E155V_I156F),

### (P48S_L84F_S97C_A106V_D108N_H123Y_D147Y_E155V_I156F),

### (W23G_L84F_A106V_D108N_H123Y_D147Y_E155V_I156F),

### (D24G_P48L_Q71R_L84F_A106V_D108N_H123Y_D147Y_E155V_I156F_Q159L),

### (L84F_A106V_D108N_H123Y_A142N_D147Y_E155V_I156F),

### (H36L_R51L_L84F_A106V_D108N_H123Y_A142N_S146C_D147Y_E155V_I156F_K157N), (N37S_L84F_A106V_D108N_H123Y_A142N_D147Y_E155V_I156F_K161T),

### (L84F_A106V_D108N_D147Y_E155V_I156F),

### (R51L_L84F_A106V_D108N_H123Y_S146C_D147Y_E155V_I156F_K157N_K161T),

### (L84F_A106V_D108N_H123Y_S146C_D147Y_E155V_I156F_K161T),

### (L84F_A106V_D108N_H123Y_S146C_D147Y_E155V_I156F_K157N_K160E_K161T),

### (L84F_A106V_D108N_H123Y_S146C_D147Y_E155V_I156F_K157N_K160E),

### (R74Q_L84F_A106V_D108N_H123Y_D147Y_E155V_I156F),

### (R74A_L84F_A106V_D108N_H123Y_D147Y_E155V_I156F),

### (L84F_A106V_D108N_H123Y_D147Y_E155V_I156F),

### (R74Q_L84F_A106V_D108N_H123Y_D147Y_E155V_I156F),

### (L84F_R98Q_A106V_D108N_H123Y_D147Y_E155V_I156F),

### (L84F_A106V_D108N_H123Y_R129Q_D147Y_E155 \7_I156F),

### (P48S_L84F_A106V_D108N_H123Y_A142N_D147Y_E155V_I156F),

### (P48S_A142N),

### (P48T_149V_L84F_A106V_D108N_H123Y_A142N_D147Y_E155V_I156F_L157N),

### (P48T_149V_A142N),

### (H36L_P48S_R51L_L84F_A106V_D108N_H123Y_S146C_D147Y_E155V_I156F_K157N),

### (H36L_P48S_R51L_L84F_A106V_D108N_H123Y_S146C_A142N_D147Y_E155V_I156F

### (H36L_P48T_149V_R51L_L84F_A106V_D108N_H123Y_S146C_D147Y_E155V_I156F_K157N),

### (H36L_P48T_149V_R51L_L84F_A106V_D108N_H123Y_A142N_S146C_D147Y_E155V_I156F_K157N),

### (H36L_P48A_R51L_L84F_A106V_D108N_H123Y_S146C_D147Y_E155V_I156F_K157N),

### (H36L_P48A_R51L_L84F_A106V_D108N_H123Y_A142N_S146C_D147Y_E155V_I156F_K157N),

### (H36L_P48A_R51L_L84F_A106V_D108N_H123Y_S146C_A142N_D147Y_E155V_I156F_K157N),

### (W23L_H36L_P48A_R51L_L84F_A106V_D108N_H123Y_S146C_D147Y_E155\7_I156F_K157N),

### (W23R_H36L_P48A_R51L_L84F_A106V_D108N_H123Y_S146C_D147Y_E155V_I156F_K157N),

### (W23L_H36L_P48A_R51L_L84F_A106V_D108N_H123Y_S146R_D147Y_E155V_I156F_K161T),

### (H36L_P48A_R51L_L84F_A106V_D108N_H123Y_S146C_D147Y_R152H_E155V_I156F_K157N),

### (H36L_P48A_R51L_L84F_A106V_D108N_H123Y_S146C_D147Y_R152P_E155V_I156F_K157N),

### (W23L_H36L_P48A_R51L_L84F_A106V_D108N_H123Y_S146C_D147Y_R152P_E155V_I156F_K157N),

### (W23L_H36L_P48A_R51L_L84F_A106V_D108N_H123Y_A142A_S146C_D147Y_E155V_I156F_K157N),

### (W23L_H36L_P48A_R51L_L84F_A106V_D108N_H123Y_A142A_S146C_D147Y_R152P_E155V_I156F_K157N),

### (W23L_H36L_P48A_R51L_L84F_A106V_D108N_H123Y_S146R_D147Y_E155V_I156F_K161T),

### (W23R_H36L_P48A_R51L_L84F_A106V_D108N_H123Y_S146C_D147Y_R152P_E155V_I156F_K157N),

### (H36L_P48A_R51L_L84F_A106V_D108N_H123Y_A142N_S146C_D147Y_R152P_E155V_I156F_K157N).

[0633] In certain embodiments, the fusion proteins provided herein comprise one or more features that improve the base editing activity of the fusion proteins. For example, any of the fusion proteins provided herein may comprise a Cas9 domain that has reduced nuclease activity. In some embodiments, any of the fusion proteins provided herein may have a Cas9 domain that does not have nuclease activity (dCas9), or a Cas9 domain that cuts one strand of a duplexed DNA molecule, referred to as a Cas9 nickase (nCas9).

[0634] In some embodiments, the adenosine deaminase is TadA*7.10. In some embodiments, TadA*7.10 comprises at least one alteration. In particular embodiments, TadA*7.10 comprises one or more of the following alterations: Y147T, Y147R, Q154S, Y123H, V82S, T166R, and Q154R. The alteration Y123H is also referred to herein as H123H (the alteration H123Y in TadA*7.10 reverted back to Y123H (wt)). In other embodiments, the TadA*7.10 comprises a combination of alterations selected from the group of: Y147T+Q154R; Y147T+Q154S; Y147R+Q154S; V82S+Q154S; V82S+Y147R; V82S+Q154R; V82S+Y123H; I76Y+V82S; V82S+Y123H+Y147T; V82S+Y123H+Y147R; V82S+Y123H+Q154R; Y147R+Q154R+Y123H; Y147R+Q154R+I76Y; Y147R+Q154R+T166R; Y123H+Y147R+Q154R+I76Y; V82S+Y123H+Y147R+Q154R; and I76Y+V82S+Y123H+Y147R+Q154R. In particular embodiments, an adenosine deaminase variant comprises a deletion of the C terminus beginning at residue 149, 150, 151, 152, 153, 154, 155, 156, and 157, relative to TadA*7.10, the TadA reference sequence, or a corresponding mutation in another TadA.

[0635] In other embodiments, a base editor of the disclosure is a monomer comprising an adenosine deaminase variant (e.g., TadA*8) comprising one or more of the following alterations: Y147T, Y147R, Q154S, Y123H, V82S, T166R, and/or Q154R, relative to TadA*7.10, the TadA reference sequence, or a corresponding mutation in another TadA. In other embodiments, the adenosine deaminase variant (TadA*8) is a monomer comprising a combination of alterations selected from the group of: Y147T+Q154R; Y147T+Q154S; Y147R+Q154S; V82S+Q154S; V82S+Y147R; V82S+Q154R; V82S+Y123H; I76Y+V82S; V82S+Y123H+Y147T; V82S+Y123H+Y147R; V82S+Y123H+Q154R; Y147R+Q154R+Y123H; Y147R+Q154R+I76Y; Y147R+Q154R+T166R; Y123H+Y147R+Q154R+I76Y; V82S+Y123H+Y147R+Q154R; and I76Y+V82S+Y123H+Y147R+Q154R, relative to TadA*7.10, the TadA reference sequence, or a corresponding mutation in another TadA.

[0636] In other embodiments, a base editor is a heterodimer comprising a wild-type adenosine deaminase and an adenosine deaminase variant (e.g., TadA*8) comprising one or more of the following alterations Y147T, Y147R, Q154S, Y123H, V82S, T166R, and/or Q154R, relative to TadA*7.10, the TadA reference sequence, or a corresponding mutation in another TadA. In other embodiments, the base editor comprises a heterodimer of a wild-type adenosine deaminase domain and an adenosine deaminase variant domain (e.g., TadA*8) comprising a combination of alterations selected from the group of: Y147T+Q154R; Y147T+Q154S; Y147R+Q154S; V82S+Q154S; V82S+Y147R; V82S+Q154R; V82S+Y123H; I76Y+V82S; V82S+Y123H+Y147T; V82S+Y123H+Y147R; V82S+Y123H+Q154R; Y147R+Q154R+Y123H; Y147R+Q154R+I76Y; Y147R+Q154R+T166R; Y123H+Y147R+Q154R+I76Y; V82S+Y123H+Y147R+Q154R; and I76Y+V82S+Y123H+Y147R+Q154R, relative to TadA*7.10, the TadA reference sequence, or a corresponding mutation in another TadA.

[0637] In other embodiments, a base editor comprises a heterodimer of a TadA*7.10 domain and an adenosine deaminase variant domain (e.g., TadA*8) comprising one or more of the following alterations Y147T, Y147R, Q154S, Y123H, V82S, T166R, and/or Q154R, relative to TadA*7.10, the TadA reference sequence, or a corresponding mutation in another TadA. In other embodiments, the base editor is a heterodimer comprising a wild-type adenosine deaminase and an adenosine deaminase variant domain (e.g., TadA*8) comprising a combination of alterations selected from the group of: Y147T+Q154R; Y147T+Q154S; Y147R+Q154S; V82S+Q154S; V82S+Y147R; V82S+Q154R; V82S+Y123H; I76Y+V82S; V82S+Y123H+Y147T; V82S+Y123H+Y147R; V82S+Y123H+Q154R; Y147R+Q154R+Y123H; Y147R+Q154R+I76Y; Y147R+Q154R+T166R; Y123H+Y147R+Q154R+I76Y; V82S+Y123H+Y147R+Q154R; and I76Y+V82S+Y123H+Y147R+Q154R, relative to TadA*7.10, the TadA reference sequence, or a corresponding mutation in another TadA.

[0638] In other embodiments, a base editor is a heterodimer comprising a TadA*7.10 domain and an adenosine deaminase variant (e.g., TadA*8) comprising one or more of the following alterations Y147T, Y147R, Q154S, Y123H, V82S, T166R, and/or Q154R, relative to TadA*7.10, the TadA reference sequence, or a corresponding mutation in another TadA. In other embodiments, the base editor is a heterodimer comprising a TadA*7.10 domain and an adenosine deaminase variant domain (e.g., TadA*8) comprising a combination of alterations selected from the group of: Y147T+Q154R; Y147T+Q154S; Y147R+Q154S; V82S+Q154S; V82S+Y147R; V82S+Q154R; V82S+Y123H; I76Y+V82S; V82S+Y123H+Y147T; V82S+Y123H+Y147R; V82S+Y123H+Q154R; Y147R+Q154R+Y123H; Y147R+Q154R+I76Y; Y147R+Q154R+T166R; Y123H+Y147R+Q154R+I76Y; V82S+Y123H+Y147R+Q154R; and I76Y+V82S+Y123H+Y147R+Q154R, relative to TadA*7.10, the TadA reference sequence, or a corresponding mutation in another TadA.

[0639] In one embodiment, an adenosine deaminase is a TadA*8 that comprises or consists essentially of the following sequence or a fragment thereof having adenosine deaminase activity:

MSEVEFSHEYWMRHALTLAKRARDEREVPVGAVLV
LNNRVIGEGWNRAIGLHDPTAHAEIMALRQGGLVM
ONYRLIDATLYVTFEPCVMCAGAMIHSRIGRVVFG
VRNAKTGAAGSLMDVLHYPGMNHRVEITEGILADE
CAALLCTFFRMPRQVFNAQKKAQSSTD

[0640] In some embodiments, the TadA*8 is a truncated. In some embodiments, the truncated TadA*8 is missing 1, 2, 3, 4, 5, 6, 7, 8, 9, 10, 11, 12, 13, 14, 15, 6, 17, 18, 19, or 20 N-terminal amino acid residues relative to the full length TadA*8. In some embodiments, the truncated TadA*8 is missing 1, 2, 3, 4, 5, 6, 7, 8, 9, 10, 11, 12, 13, 14, 15, 6, 17, 18, 19, or 20 C-terminal amino acid residues relative to the full length TadA*8. In some embodiments the adenosine deaminase variant is a full-length TadA*8.

[0641] In some embodiments the TadA*8 is TadA*8.1, TadA*8.2, TadA*8.3, TadA*8.4, TadA*8.5, TadA*8.6, TadA*8.7, TadA*8.8, TadA*8.9, TadA*8.10, TadA*8.11, TadA*8.12, TadA*8.13, TadA*8.14, TadA*8.15, TadA*8.16, TadA*8.17, TadA*8.18, TadA*8.19, TadA*8.20, TadA*8.21, TadA*8.22, TadA*8.23, or TadA*8.24.

[0642] In other embodiments, a base editor of the disclosure is a monomer comprising an adenosine deaminase variant (e.g., TadA*8) comprising one or more of the following alterations: R26C, V88A, A109S, T111R, D119N, H122N, Y147D, F149Y, T166I and/or D167N, relative to TadA*7.10, the TadA reference sequence, or a corresponding mutation in another TadA. In other embodiments, the adenosine deaminase variant (TadA*8) is a monomer comprising a combination of alterations selected from the group of: R26C+A109S+T111R+D119N+H122N+Y147D+F149Y+T166I+D167N; V88A+A109S+T111R+D119N+H122N+F149Y+T166I+D167N; R26C+A109S+T111R+D119N+H122N+F149Y+T166I+D167N; V88A+T111R+D119N+F149Y; and A109S+T111R+D119N+H122N+Y147D+F149Y+T166I+D167N, relative to TadA*7.10, the TadA reference sequence, or a corresponding mutation in another TadA.

[0643] In other embodiments, a base editor is a heterodimer comprising a wild-type adenosine deaminase and an adenosine deaminase variant (e.g., TadA*8) comprising one or more of the following alterations R26C, V88A, A109S, T111R, D119N, H122N, Y147D, F149Y, T166I and/or D167N, relative to TadA*7.10, the TadA reference sequence, or a corresponding mutation in another TadA. In other embodiments, the base editor is a heterodimer comprising a wild-type adenosine deaminase and an adenosine deaminase variant domain (e.g., TadA*8) comprising a combination of alterations selected from the group of: R26C+A109S+T111R+D119N+H122N+Y147D+F149Y+T166I+D167N; V88A+A109S+T111R+D119N+H122N+F149Y+T166I+D167N; R26C+A109S+T111R+D119N+H122N+F149Y+T166I+D167N; V88A+T111R+D119N+F149Y; and A109S+T111R+D119N+H122N+Y147D+F149Y+T166I+D167N, relative to TadA*7.10, the TadA reference sequence, or a corresponding mutation in another TadA.

[0644] In other embodiments, a base editor is a heterodimer comprising a TadA*7.10 domain and an adenosine deaminase variant (e.g., TadA*8) comprising one or more of the following alterations R26C, V88A, A109S, T111R, D119N, H122N, Y147D, F149Y, T166I and/or D167N, relative to TadA*7.10, the TadA reference sequence, or a corresponding mutation in another TadA. In other embodiments, the base editor is a heterodimer comprising a TadA*7.10 domain and an adenosine deaminase variant domain (e.g., TadA*8) comprising a combination of alterations selected from the group of: R26C+A109S+T111R+D119N+H122N+Y147D+F149Y+T166I+D167N; V88A+A109S+T111R+D119N+H122N+F149Y+T166I+D167N; R26C+A109S+T111R+D119N+H122N+F149Y+T166I+D167N; V88A+T111R+D119N+F149Y; and A109S+T111R+D119N+H122N+Y147D+F149Y+T166I+D167N, relative to TadA*7.10, the TadA reference sequence, or a corresponding mutation in another TadA.

[0645] In some embodiments, the TadA*8 is a variant as shown in Table 8. Table 8 shows certain amino acid position numbers in the TadA amino acid sequence and the amino acids present in those positions in the TadA-7.10 adenosine deaminase. Table 8 also shows amino acid changes in TadA variants relative to TadA*7.10 following phage-assisted non-continuous evolution (PANCE) and phage-assisted continuous evolution (PACE), as described in M. Richter et al., 2020, Nature Biotechnology, doi.org/10.1038/s41587-020-0453-z, the entire contents of which are incorporated by reference herein. In some embodiments, the TadA*8 is TadA*8a, TadA*8b, TadA*8c, TadA*8d, or TadA*8e. In some embodiments, the TadA*8 is TadA*8e.

TABLE 8
Additional TadA*8 Variants

| | | TadA amino acid number | | | | | | | | | |
|---|---|---|---|---|---|---|---|---|---|---|---|
| | TadA | 26 | 88 | 109 | 111 | 119 | 122 | 147 | 149 | 166 | 167 |
| | TadA-7.10 | R | V | A | T | D | H | Y | F | T | D |
| PANCE 1 | | | | | R | | | | | | |
| PANCE 2 | | | | S/T | R | | | | | | |
| PACE | TadA-8a | C | | S | R | N | N | D | Y | I | N |
| | TadA-8b | | A | S | R | N | N | | Y | I | N |
| | TadA-8c | C | | S | R | N | N | | Y | I | N |
| | TadA-8d | | A | | R | N | | | Y | | |
| | TadA-8e | | | S | R | N | N | D | Y | I | N |

[0646] In one embodiment, a fusion protein of the disclosure comprises a wild-type TadA linked to an adenosine deaminase variant described herein (e.g., TadA*8), which is linked to Cas9 nickase. In particular embodiments, the fusion proteins comprise a single TadA*8 domain (e.g., provided as a monomer). In other embodiments, the base editor comprises TadA*8 and TadA(wt), which are capable of forming heterodimers. Exemplary sequences follow:

TadA(wt) or “the TadA reference sequence”:

MSEVEFSHEYWMRHALTLAKRAWDEREVPVGAVLV
HNNRVIGEGWNRPIGRHDPTAHAEIMALRQGGLVM
ONYRLIDATLYVTLEPCVMCAGAMIHSRIGRVVFG
ARDAKTGAAGSLMDVLHHPGMNHRVEITEGILADE
CAALLSDFFRMRRQEIKAQKKAQSSTD

### TadA*7.10:

MSEVEFSHEYWMRHALTLAKRARDEREVPVGAVLV
LNNRVIGEGWNRAIGLHDPTAHAEIMALRQGGLVM
ONYRLIDATLYVTFEPCVMCAGAMIHSRIGRVVFG
VRNAKTGAAGSLMDVLHYPGMNHRVEITEGILADE
CAALLCYFFRMPRQVFNAQKKAQSSTD

### TadA*8:

MSEVEFSHEYWMRHALTLAKRARDEREVPVGAVLVLNNRVIGEGWNRAI
GLHDPTAHAEIMALRQGGLVMONYRLIDATLYVTFEPCVMCAGAMIHSR
IGRVVFGVRNAKTGAAGSLMDVLHYPGMNHRVEITEGILADECAALLCT
FFRMPRQVFNAQKKAQSSTD.

[0649] In some embodiments, the adenosine deaminase comprises an amino acid sequence that is at least 60%, at least 65%, at least 70%, at least 75%, at least 80%, at least 85%, at least 90%, at least 95%, at least 96%, at least 97%, at least 98%, at least 99%, or at least 99.5% identical to any one of the amino acid sequences set forth in any of the adenosine deaminases provided herein. It should be appreciated that adenosine deaminases provided herein may include one or more mutations (e.g., any of the mutations provided herein). The disclosure provides any deaminase domains with a certain percent identity plus any of the mutations or combinations thereof described herein. In some embodiments, the adenosine deaminase comprises an amino acid sequence that has 1, 2, 3, 4, 5, 6, 7, 8, 9, 10, 11, 12, 13, 14, 15, 16, 17, 18, 19, 20, 21, 22, 23, 24, 25, 26, 27, 28, 29, 30, 31, 32, 33, 34, 35, 36, 37, 38, 39, 40, 41, 42, 43, 44, 45, 46, 47, 48, 49, 50, or more mutations compared to a reference sequence, or any of the adenosine deaminases provided herein. In some embodiments, the adenosine deaminase comprises an amino acid sequence that has at least 5, at least 10, at least 15, at least 20, at least 25, at least 30, at least 35, at least 40, at least 45, at least 50, at least 60, at least 70, at least 80, at least 90, at least 100, at least 110, at least 120, at least 130, at least 140, at least 150, at least 160, or at least 170 identical contiguous amino acid residues as compared to any one of the amino acid sequences known in the art or described herein.

[0650] In particular embodiments, a TadA*8 comprises one or more mutations at any of the following positions shown in bold. In other embodiments, a TadA*8 comprises one or more mutations at any of the positions shown with underlining:

| | |
|---|---|
| MSEVEFSHEY WMRHALTLAK RARDEREVPV GAVLVLNNRV IGEGWNRAIG | 50 |
| LHDPTAHAEI MALRQGGLVM QNYRLIDATL YVTFEPCVMC AGAMIHSRIG | 100 |
| RVVFGVRNAK TGAAGSLMDV LHYPGMNHRV EITEGILADE CAALLCYFFR | 150 |
| MPRQVFNAQK KAQSSTD | |

[0651] For example, the TadA*8 comprises alterations at amino acid position 82 and/or 166 (e.g., V82S, T166R) alone or in combination with any one or more of the following Y147T, Y147R, Q154S, Y123H, and/or Q154R, relative to TadA*7.10, the TadA reference sequence, or a corresponding mutation in another TadA. In particular embodiments, a combination of alterations is selected from the group of: Y147T+Q154R; Y147T+Q154S; Y147R+Q154S; V82S+Q154S; V82S+Y147R; V82S+Q154R; V82S+Y123H; I76Y+V82S; V82S+Y123H+Y147T; V82S+Y123H+Y147R; V82S+Y123H+Q154R; Y147R+Q154R+Y123H; Y147R+Q154R+I76Y; Y147R+Q154R+T166R; Y123H+Y147R+Q154R+I76Y; V82S+Y123H+Y147R+Q154R; and I76Y+V82S+Y123H+Y147R+Q154R, relative to TadA*7.10, the TadA reference sequence, or a corresponding mutation in another TadA.

[0652] In some embodiments, the adenosine deaminase is TadA*8, which comprises or consists essentially of the following sequence or a fragment thereof having adenosine deaminase activity:

MSEVEESHEY WMRHALTLAK RARDEREVPV GAVLVLNNRV
IGEGWNRAIG LHDPTAHAEI MALRQGGLVM QNYRLIDATL
YVTFEPCVMC AGAMIHSRIG RVVFGVRNAK TGAAGSLMDV
LHYPGMNHRV EITEGILADE CAALLCTFFR MPRQVFNAQK
KAQSSTD

[0653] In some embodiments, the TadA*8 is truncated. In some embodiments, the truncated TadA*8 is missing 1, 2, 3, 4, 5, 6, 7, 8, 9, 10, 11, 12, 13, 14, 15, 6, 17, 18, 19, or 20 N-terminal amino acid residues relative to the full length TadA*8. In some embodiments, the truncated TadA*8 is missing 1, 2, 3, 4, 5, 6, 7, 8, 9, 10, 11, 12, 13, 14, 15, 6, 17, 18, 19, or 20 C-terminal amino acid residues relative to the full length TadA*8. In some embodiments the adenosine deaminase variant is a full-length TadA*8.

[0654] In one embodiment, a fusion protein of the disclosure comprises a wild-type TadA is linked to an adenosine deaminase variant described herein (e.g., TadA*8), which is linked to Cas9 nickase. In particular embodiments, the fusion proteins comprise a single TadA*8 domain (e.g., provided as a monomer). In other embodiments, the base editor comprises TadA*8 and TadA(wt), which are capable of forming heterodimers.

Cas9 Complexes with Guide RNAs

[0655] Some aspects of this disclosure provide complexes comprising any of the fusion proteins provided herein, and a guide RNA bound to a Cas9 domain (e.g., a dCas9, a nuclease active Cas9, or a Cas9 nickase) of fusion protein. In some embodiments, the guide nucleic acid (e.g., guide RNA) is from 15-100 nucleotides long and comprises a sequence of at least 10 contiguous nucleotides that is complementary to a target sequence. In some embodiments, the guide RNA is 15, 16, 17, 18, 19, 20, 21, 22, 23, 24, 25, 26, 27, 28, 29, 30, 31, 32, 33, 34, 35, 36, 37, 38, 39, 40, 41, 42, 43, 44, 45, 46, 47, 48, 49, or 50 nucleotides long. In some embodiments, the guide RNA comprises a sequence of 15, 16, 17, 18, 19, 20, 21, 22, 23, 24, 25, 26, 27, 28, 29, 30, 31, 32, 33, 34, 35, 36, 37, 38, 39, or 40 contiguous nucleotides that is complementary to a target sequence. In some embodiments, the target sequence is a DNA sequence. In some embodiments, the target sequence is a sequence in the genome of a bacteria, yeast, fungi, insect, plant, or animal. In some embodiments, the target sequence is a sequence in the genome of a human. In some embodiments, the 3′ end of the target sequence is immediately adjacent to a canonical PAM sequence (NGG). In some embodiments, the 3′ end of the target sequence is immediately adjacent to a non-canonical PAM sequence (e.g., a sequence listed in Table 1 or 5′-NAA-3′). In some embodiments, the guide nucleic acid (e.g., guide RNA) is complementary to a sequence in a gene of interest (e.g., a gene associated with a disease or disorder).

[0656] Some aspects of this disclosure provide methods of using the fusion proteins, or complexes provided herein. For example, some aspects of this disclosure provide methods comprising contacting a DNA molecule with any of the fusion proteins provided herein, and with at least one guide RNA, wherein the guide RNA is about 15-100 nucleotides long and comprises a sequence of at least 10 contiguous nucleotides that is complementary to a target sequence. In some embodiments, the 3′ end of the target sequence is immediately adjacent to an AGC, GAG, TTT, GTG, or CAA sequence. In some embodiments, the 3′ end of the target sequence is immediately adjacent to an NGA, NGC, NGCG, NGN, NNGRRT, NNNRRT, NGCG, NGCN, NGTN, NGTN, NGTN, or 5′ (TTTV) sequence.

[0657] It will be understood that the numbering of the specific positions or residues in the respective sequences depends on the particular protein and numbering scheme used. Numbering might be different, e.g., in precursors of a mature protein and the mature protein itself, and differences in sequences from species to species may affect numbering. One of skill in the art will be able to identify the respective residue in any homologous protein and in the respective encoding nucleic acid by methods well known in the art, e.g., by sequence alignment and determination of homologous residues.

[0658] It will be apparent to those of skill in the art that in order to target any of the fusion proteins disclosed herein, to a target site, e.g., a site comprising a mutation to be edited, it is typically necessary to co-express the fusion protein together with a guide RNA. As explained in more detail elsewhere herein, a guide RNA typically comprises a tracrRNA framework allowing for Cas9 binding, and a guide sequence, which confers sequence specificity to the Cas9:nucleic acid editing enzyme/domain fusion protein. Alternatively, the guide RNA and tracrRNA may be provided separately, as two nucleic acid molecules. In some embodiments, the guide RNA comprises a structure, wherein the guide sequence comprises a sequence that is complementary to the target sequence. The guide sequence is typically 20 nucleotides long. The sequences of suitable guide RNAs for targeting Cas9:nucleic acid editing enzyme/domain fusion proteins to specific genomic target sites will be apparent to those of skill in the art based on the instant disclosure. Such suitable guide RNA sequences typically comprise guide sequences that are complementary to a nucleic sequence within 50 nucleotides upstream or downstream of the target nucleotide to be edited. Some exemplary guide RNA sequences suitable for targeting any of the provided fusion proteins to specific target sequences are provided herein.

### Additional Domains

[0659] A base editor described herein can include any domain which helps to facilitate the nucleobase editing, modification or altering of a nucleobase of a polynucleotide. In some embodiments, a base editor comprises a polynucleotide programmable nucleotide binding domain (e.g., Cas9), a nucleobase editing domain (e.g., deaminase domain), and one or more additional domains. In some cases, the additional domain can facilitate enzymatic or catalytic functions of the base editor, binding functions of the base editor, or be inhibitors of cellular machinery (e.g., enzymes) that could interfere with the desired base editing result. In some embodiments, a base editor can comprise a nuclease, a nickase, a recombinase, a deaminase, a methyltransferase, a methylase, an acetylase, an acetyltransferase, a transcriptional activator, or a transcriptional repressor domain.

[0660] In some embodiments, a base editor can comprise a uracil glycosylase inhibitor (UGI) domain. A UGI domain can for example improve the efficiency of base editors comprising a cytidine deaminase domain by inhibiting the conversion of a U formed by deamination of a C back to the C nucleobase. In some cases, cellular DNA repair response to the presence of U:G heteroduplex DNA can be responsible for a decrease in nucleobase editing efficiency in cells. In such cases, uracil DNA glycosylase (UDG) can catalyze removal of U from DNA in cells, which can initiate base excision repair (BER), mostly resulting in reversion of the U:G pair to a C:G pair. In such cases, BER can be inhibited in base editors comprising one or more domains that bind the single strand, block the edited base, inhibit UGI, inhibit BER, protect the edited base, and/or promote repairing of the non-edited strand. Thus, this disclosure contemplates a base editor fusion protein comprising a UGI domain.

[0661] In some embodiments, a base editor comprises as a domain all or a portion of a double-strand break (DSB) binding protein. For example, a DSB binding protein can include a Gam protein of bacteriophage Mu that can bind to the ends of DSBs and can protect them from degradation. See Komor, A. C., et al., “Improved base excision repair inhibition and bacteriophage Mu Gam protein yields C:G-to-T:A base editors with higher efficiency and product purity” Science Advances 3:eaao4774 (2017), the entire content of which is hereby incorporated by reference.

[0662] Additionally, in some embodiments, a Gam protein can be fused to an N terminus of a base editor. In some embodiments, a Gam protein can be fused to a C-terminus of a base editor. The Gam protein of bacteriophage Mu can bind to the ends of double strand breaks (DSBs) and protect them from degradation. In some embodiments, using Gam to bind the free ends of DSB can reduce indel formation during the process of base editing. In some embodiments, 174-residue Gam protein is fused to the N terminus of the base editors. See. Komor, A. C., et al., “Improved base excision repair inhibition and bacteriophage Mu Gam protein yields C:G-to-T:A base editors with higher efficiency and product purity” Science Advances 3:eaao4774 (2017). In some embodiments, a mutation or mutations can change the length of a base editor domain relative to a wild-type domain. For example, a deletion of at least one amino acid in at least one domain can reduce the length of the base editor. In another case, a mutation or mutations do not change the length of a domain relative to a wild-type domain. For example, substitution(s) in any domain does/do not change the length of the base editor.

[0663] In some embodiments, a base editor can comprise as a domain all or a portion of a nucleic acid polymerase (NAP). For example, a base editor can comprise all or a portion of a eukaryotic NAP. In some embodiments, a NAP or portion thereof incorporated into a base editor is a DNA polymerase. In some embodiments, a NAP or portion thereof incorporated into a base editor has translesion polymerase activity. In some cases, a NAP or portion thereof incorporated into a base editor is a translesion DNA polymerase. In some embodiments, a NAP or portion thereof incorporated into a base editor is a Rev7, Rev1 complex, polymerase iota, polymerase kappa, or polymerase eta. In some embodiments, a NAP or portion thereof incorporated into a base editor is a eukaryotic polymerase alpha, beta, gamma, delta, epsilon, gamma, eta, iota, kappa, lambda, mu, or nu component. In some embodiments, a NAP or portion thereof incorporated into a base editor comprises an amino acid sequence that is at least 75%, 80%, 85%, 90%, 95%, 96%, 97%, 98%, 99%, or 99.5% identical to a nucleic acid polymerase (e.g., a translesion DNA polymerase).

### Base Editor System

[0664] The base editor system provided herein comprises the steps of: (a) contacting a target nucleotide sequence of a polynucleotide (e.g., a double-stranded DNA or RNA, a single-stranded DNA or RNA) of a subject with a base editor system comprising an adenosine deaminase domain, wherein the aforementioned domains are fused to a polynucleotide binding domain, thereby forming a nucleobase editor capable of inducing changes at one or more bases within a nucleic acid molecule as described herein and at least one guide polynucleic acid (e.g., gRNA), wherein the target nucleotide sequence comprises a targeted nucleobase pair; (b) inducing strand separation of the target region; (c) converting a first nucleobase of the target nucleobase pair in a single strand of the target region to a second nucleobase; and (d) cutting no more than one strand of the target region, where a third nucleobase complementary to the first nucleobase base is replaced by a fourth nucleobase complementary to the second nucleobase. It should be appreciated that in some embodiments, step (b) is omitted. In some embodiments, the targeted nucleobase pair is a plurality of nucleobase pairs in one or more genes. In some embodiments, the base editor system provided herein is capable of multiplex editing of a plurality of nucleobase pairs in one or more genes. In some embodiments, the plurality of nucleobase pairs is located in the same gene. In some embodiments, the plurality of nucleobase pairs is located in one or more genes, wherein at least one gene is located in a different locus.

[0665] In some embodiments, the cut single strand (nicked strand) is hybridized to the guide nucleic acid. In some embodiments, the cut single strand is opposite to the strand comprising the first nucleobase. In some embodiments, the base editor comprises a Cas9 domain. In some embodiments, the first base is adenine, and the second base is not a G, C, A, or T. In some embodiments, the second base is inosine.

[0666] Provided herein are systems, compositions, and methods for editing a nucleobase using a base editor system. In some embodiments, the base editor system comprises a base editor (BE) comprising a polynucleotide programmable nucleotide binding domain and a nucleobase editing domain (e.g., deaminase domain) for editing the nucleobase; and a guide polynucleotide (e.g., guide RNA) in conjunction with the polynucleotide programmable nucleotide binding domain. In some embodiments, the base editor system comprises a base editor (BE) comprising a polynucleotide programmable nucleotide binding domain and a nucleobase editing domain (e.g., deaminase domain) for editing the nucleobase, and a guide polynucleotide (e.g., guide RNA) in conjunction with the polynucleotide programmable nucleotide binding domain. In some embodiments, the polynucleotide programmable nucleotide binding domain is a polynucleotide programmable DNA binding domain. In some embodiments, the polynucleotide programmable nucleotide binding domain is a polynucleotide programmable RNA binding domain. In some cases, a deaminase domain can be an adenine deaminase or an adenosine deaminase. In some embodiments, the terms “adenine deaminase” and “adenosine deaminase” can be used interchangeably. In some cases, a deaminase domain can be an adenine deaminase or an adenosine deaminase. Details of nucleobase editing proteins are described in International PCT Application Nos. PCT/2017/045381 (WO2018/027078) and PCT/US2016/058344 (WO2017/070632), each of which is incorporated herein by reference for its entirety. Also see Komor, A. C., et al., “Programmable editing of a target base in genomic DNA without double-stranded DNA cleavage” Nature 533, 420-424 (2016); Gaudelli, N. M., et al., “Programmable base editing of A•T to G•C in genomic DNA without DNA cleavage” Nature 551, 464-471 (2017); and Komor, A. C., et al., “Improved base excision repair inhibition and bacteriophage Mu Gam protein yields C:G-to-T:A base editors with higher efficiency and product purity” Science Advances 3:eaao4774 (2017), the entire contents of which are hereby incorporated by reference.

[0667] In some embodiments, a single guide polynucleotide may be utilized to target a deaminase to a target nucleic acid sequence. In some embodiments, a single pair of guide polynucleotides may be utilized to target different deaminases to a target nucleic acid sequence.

[0668] The nucleobase components and the polynucleotide programmable nucleotide binding component of a base editor system may be associated with each other covalently or non-covalently. For example, in some embodiments, the deaminase domain can be targeted to a target nucleotide sequence by a polynucleotide programmable nucleotide binding domain. In some embodiments, a polynucleotide programmable nucleotide binding domain can be fused or linked to a deaminase domain. In some embodiments, a polynucleotide programmable nucleotide binding domain can target a deaminase domain to a target nucleotide sequence by non-covalently interacting with or associating with the deaminase domain. For example, in some embodiments, the nucleobase editing component, e.g., the deaminase component can comprise an additional heterologous portion or domain that is capable of interacting with, associating with, or capable of forming a complex with an additional heterologous portion or domain that is part of a polynucleotide programmable nucleotide binding domain. In some embodiments, the additional heterologous portion may be capable of binding to, interacting with, associating with, or forming a complex with a polypeptide. In some embodiments, the additional heterologous portion may be capable of binding to, interacting with, associating with, or forming a complex with a polynucleotide. In some embodiments, the additional heterologous portion may be capable of binding to a guide polynucleotide. In some embodiments, the additional heterologous portion may be capable of binding to a polypeptide linker. In some embodiments, the additional heterologous portion may be capable of binding to a polynucleotide linker. The additional heterologous portion may be a protein domain. In some embodiments, the additional heterologous portion may be a K Homology (KH) domain, a MS2 coat protein domain, a PP7 coat protein domain, a SfMu Com coat protein domain, a steril alpha motif, a telomerase Ku binding motif and Ku protein, a telomerase Sm7 binding motif and Sm7 protein, or a RNA recognition motif A base editor system may further comprise a guide polynucleotide component. It should be appreciated that components of the base editor system may be associated with each other via covalent bonds, noncovalent interactions, or any combination of associations and interactions thereof. In some embodiments, a deaminase domain can be targeted to a target nucleotide sequence by a guide polynucleotide. For example, in some embodiments, the nucleobase editing component of the base editor system, e.g., the deaminase component, can comprise an additional heterologous portion or domain (e.g., polynucleotide binding domain such as an RNA or DNA binding protein) that is capable of interacting with, associating with, or capable of forming a complex with a portion or segment (e.g., a polynucleotide motif) of a guide polynucleotide. In some embodiments, the additional heterologous portion or domain (e.g., polynucleotide binding domain such as an RNA or DNA binding protein) can be fused or linked to the deaminase domain. In some embodiments, the additional heterologous portion may be capable of binding to, interacting with, associating with, or forming a complex with a polypeptide. In some embodiments, the additional heterologous portion may be capable of binding to, interacting with, associating with, or forming a complex with a polynucleotide. In some embodiments, the additional heterologous portion may be capable of binding to a guide polynucleotide. In some embodiments, the additional heterologous portion may be capable of binding to a polypeptide linker. In some embodiments, the additional heterologous portion may be capable of binding to a polynucleotide linker. The additional heterologous portion may be a protein domain. In some embodiments, the additional heterologous portion may be a K Homology (KH) domain, a MS2 coat protein domain, a PP7 coat protein domain, a SfMu Com coat protein domain, a sterile alpha motif, a telomerase Ku binding motif and Ku protein, a telomerase Sm7 binding motif and Sm7 protein, or a RNA recognition motif.

[0669] In some embodiments, a base editor system can further comprise an inhibitor of base excision repair (BER) component. It should be appreciated that components of the base editor system may be associated with each other via covalent bonds, noncovalent interactions, or any combination of associations and interactions thereof. The inhibitor of BER component may comprise a base excision repair inhibitor. In some embodiments, the inhibitor of base excision repair can be a uracil DNA glycosylase inhibitor (UGI). In some embodiments, the inhibitor of base excision repair can be an inosine base excision repair inhibitor. In some embodiments, the inhibitor of base excision repair can be targeted to the target nucleotide sequence by the polynucleotide programmable nucleotide binding domain. In some embodiments, a polynucleotide programmable nucleotide binding domain can be fused or linked to an inhibitor of base excision repair. In some embodiments, a polynucleotide programmable nucleotide binding domain can be fused or linked to a deaminase domain and an inhibitor of base excision repair. In some embodiments, a polynucleotide programmable nucleotide binding domain can target an inhibitor of base excision repair to a target nucleotide sequence by non-covalently interacting with or associating with the inhibitor of base excision repair. For example, in some embodiments, the inhibitor of base excision repair component can comprise an additional heterologous portion or domain that is capable of interacting with, associating with, or capable of forming a complex with an additional heterologous portion or domain that is part of a polynucleotide programmable nucleotide binding domain. In some embodiments, the inhibitor of base excision repair can be targeted to the target nucleotide sequence by the guide polynucleotide. For example, in some embodiments, the inhibitor of base excision repair can comprise an additional heterologous portion or domain (e.g., polynucleotide binding domain such as an RNA or DNA binding protein) that is capable of interacting with, associating with, or capable of forming a complex with a portion or segment (e.g., a polynucleotide motif) of a guide polynucleotide. In some embodiments, the additional heterologous portion or domain of the guide polynucleotide (e.g., polynucleotide binding domain such as an RNA or DNA binding protein) can be fused or linked to the inhibitor of base excision repair. In some embodiments, the additional heterologous portion may be capable of binding to, interacting with, associating with, or forming a complex with a polynucleotide. In some embodiments, the additional heterologous portion may be capable of binding to a guide polynucleotide. In some embodiments, the additional heterologous portion may be capable of binding to a polypeptide linker. In some embodiments, the additional heterologous portion may be capable of binding to a polynucleotide linker. The additional heterologous portion may be a protein domain. In some embodiments, the additional heterologous portion may be a K Homology (KH) domain, a MS2 coat protein domain, a PP7 coat protein domain, a SfMu Com coat protein domain, a sterile alpha motif, a telomerase Ku binding motif and Ku protein, a telomerase Sm7 binding motif and Sm7 protein, or a RNA recognition motif.

[0670] In some embodiments, the base editor inhibits base excision repair of the edited strand. In some embodiments, the base editor protects or binds the non-edited strand. In some embodiments, the base editor comprises UGI activity. In some embodiments, the base editor comprises a catalytically inactive inosine-specific nuclease. In some embodiments, the base editor comprises nickase activity. In some embodiments, the intended edit of base pair is upstream of a PAM site. In some embodiments, the intended edit of base pair is 1, 2, 3, 4, 5, 6, 7, 8, 9, 10, 11, 12, 13, 14, 15, 16, 17, 18, 19, or 20 nucleotides upstream of the PAM site. In some embodiments, the intended edit of base-pair is downstream of a PAM site. In some embodiments, the intended edited base pair is 1, 2, 3, 4, 5, 6, 7, 8, 9, 10, 11, 12, 13, 14, 15, 16, 17, 18, 19, or 20 nucleotides downstream stream of the PAM site.

[0671] In some embodiments, the method does not require a canonical (e.g., NGG) PAM site. In some embodiments, the nucleobase editor comprises a linker or a spacer. In some embodiments, the linker or spacer is 1-25 amino acids in length. In some embodiments, the linker or spacer is 5-20 amino acids in length. In some embodiments, the linker or spacer is 10, 11, 12, 13, 14, 15, 16, 17, 18, 19, or 20 amino acids in length.

[0672] In some embodiments, the target region comprises a target window, wherein the target window comprises the target nucleobase pair. In some embodiments, the target window comprises 1-10 nucleotides. In some embodiments, the target window is 1, 2, 3, 4, 5, 6, 7, 8, 9, 10, 11, 12, 13, 14, 15, 16, 17, 18, 19, or 20 nucleotides in length. In some embodiments, the intended edit of base pair is within the target window. In some embodiments, the target window comprises the intended edit of base pair. In some embodiments, the method is performed using any of the base editors provided herein. In some embodiments, a target window is a deamination window.

[0673] In some embodiments, the adenosine base editor (ABE) can deaminate adenine in DNA. In some embodiments, ABE is generated by replacing APOBEC1 component of BE3 with natural or engineered E. coli TadA, human ADAR2, mouse ADA, or human ADAT2. In some embodiments, ABE comprises an evolved TadA variant. In some embodiments, the ABE is ABE 1.2 (TadA*-XTEN-nCas9-NLS). In some embodiments, TadA* comprises A106V and D108N mutations.

[0674] In some embodiments, the ABE is a second-generation ABE. In some embodiments, the ABE is ABE2.1, which comprises additional mutations D147Y and E155V in TadA* (TadA*2.1). In some embodiments, the ABE is ABE2.2, ABE2.1 fused to catalytically inactivated version of human alkyl adenine DNA glycosylase (AAG with E125Q mutation). In some embodiments, the ABE is ABE2.3, ABE2.1 fused to catalytically inactivated version of E. coli Endo V (inactivated with D35A mutation). In some embodiments, the ABE is ABE2.6 which has a linker twice as long (32 amino acids, (SGGS)₂-XTEN-(SGGS)₂) as the linker in ABE2.1. In some embodiments, the ABE is ABE2.7, which is ABE2.1 tethered with an additional wild-type TadA monomer. In some embodiments, the ABE is ABE2.8, which is ABE2.1 tethered with an additional TadA*2.1 monomer. In some embodiments, the ABE is ABE2.9, which is a direct fusion of evolved TadA (TadA*2.1) to the N-terminus of ABE2.1. In some embodiments, the ABE is ABE2.10, which is a direct fusion of wild type TadA to the N-terminus of ABE2.1. In some embodiments, the ABE is ABE2.11, which is ABE2.9 with an inactivating E59A mutation at the N-terminus of TadA* monomer. In some embodiments, the ABE is ABE2.12, which is ABE2.9 with an inactivating E59A mutation in the internal TadA* monomer.

[0675] In some embodiments, the ABE is a third generation ABE. In some embodiments, the ABE is ABE3.1, which is ABE2.3 with three additional TadA mutations (L84F, H123Y, and I156F).

[0676] In some embodiments, the ABE is a fourth generation ABE. In some embodiments, the ABE is ABE4.3, which is ABE3.1 with an additional TadA mutation A142N (TadA*4.3).

[0677] In some embodiments, the ABE is a fifth generation ABE. In some embodiments, the ABE is ABE5.1, which is generated by importing a consensus set of mutations from surviving clones (H36L, R51L, S146C, and K157N) into ABE3.1. In some embodiments, the ABE is ABE5.3, which has a heterodimeric construct containing wild-type E. coli TadA fused to an internal evolved TadA*. In some embodiments, the ABE is ABE5.2, ABE5.4, ABE5.5, ABE5.6, ABE5.7, ABE5.8, ABE5.9, ABE5.10, ABE5.11, ABE5.12, ABE5.13, or ABE5.14, as shown in below Table 9. In some embodiments, tshe ABE is a sixth generation ABE. In some embodiments, the ABE is ABE6.1, ABE6.2, ABE6.3, ABE6.4, ABE6.5, or ABE6.6, as shown in below Table 9. In some embodiments, the ABE is a seventh generation ABE. In some embodiments, the ABE is ABE7.1, ABE7.2, ABE7.3, ABE7.4, ABE7.5, ABE7.6, ABE7.7, ABE7.8, ABE 7.9, or ABE7.10, as shown in Table 9 below.

TABLE 9
Genotypes of ABEs

| | 23 | 26 | 36 | 37 | 48 | 49 | 51 | 72 | 84 | 87 | 106 | 108 | 123 | 125 | 142 | 146 | 147 | 152 | 155 | 156 | 157 | 161 |
|---|---|---|---|---|---|---|---|---|---|---|---|---|---|---|---|---|---|---|---|---|---|---|
| ABE0.1 | W | R | H | N | P | | R | N | L | S | A | D | H | G | A | S | D | R | E | I | K | K |
| ABE0.2 | W | R | H | N | P | | R | N | L | S | A | D | H | G | A | S | D | R | E | I | K | K |
| ABE1.1 | W | R | H | N | P | | R | N | L | S | A | N | H | G | A | S | D | R | E | I | K | K |
| ABE1.2 | W | R | H | N | P | | R | N | L | S | V | N | H | G | A | S | D | R | E | I | K | K |
| ABE2.1 | W | R | H | N | P | | R | N | L | S | V | N | H | G | A | S | Y | R | V | I | K | K |
| ABE2.2 | W | R | H | N | P | | R | N | L | S | V | N | H | G | A | S | Y | R | V | I | K | K |
| ABE2.3 | W | R | H | N | P | | R | N | L | S | V | N | H | G | A | S | Y | R | V | I | K | K |
| ABE2.4 | W | R | H | N | P | | R | N | L | S | V | N | H | G | A | S | Y | R | V | I | K | K |
| ABE2.5 | W | R | H | N | P | | R | N | L | S | V | N | H | G | A | S | Y | R | V | I | K | K |
| ABE2.6 | W | R | H | N | P | | R | N | L | S | V | N | H | G | A | S | Y | R | V | I | K | K |
| ABE2.7 | W | R | H | N | P | | R | N | L | S | V | N | H | G | A | S | Y | R | V | I | K | K |
| ABE2.8 | W | R | H | N | P | | R | N | L | S | V | N | H | G | A | S | Y | R | V | I | K | K |
| ABE2.9 | W | R | H | N | P | | R | N | L | S | V | N | H | G | A | S | Y | R | V | I | K | K |
| ABE2.10 | W | R | H | N | P | | R | N | L | S | V | N | H | G | A | S | Y | R | V | I | K | K |
| ABE2.11 | W | R | H | N | P | | R | N | L | S | V | N | H | G | A | S | Y | R | V | I | K | K |
| ABE2.12 | W | R | H | N | P | | R | N | L | S | V | N | H | G | A | S | Y | R | V | I | K | K |
| ABE3.1 | W | R | H | N | P | | R | N | F | S | V | N | Y | G | A | S | Y | R | V | F | K | K |
| ABE3.2 | W | R | H | N | P | | R | N | F | S | V | N | Y | G | A | S | Y | R | V | F | K | K |
| ABE3.3 | W | R | H | N | P | | R | N | F | S | V | N | Y | G | A | S | Y | R | V | F | K | K |
| ABE3.4 | W | R | H | N | P | | R | N | F | S | V | N | Y | G | A | S | Y | R | V | F | K | K |
| ABE3.5 | W | R | H | N | P | | R | N | F | S | V | N | Y | G | A | S | Y | R | V | F | K | K |
| ABE3.6 | W | R | H | N | P | | R | N | F | S | V | N | Y | G | A | S | Y | R | V | F | K | K |
| ABE3.7 | W | R | H | N | P | | R | N | F | S | V | N | Y | G | A | S | Y | R | V | F | K | K |
| ABE3.8 | W | R | H | N | P | | R | N | F | S | V | N | Y | G | A | S | Y | R | V | F | K | K |
| ABE4.1 | W | R | H | N | P | | R | N | L | S | V | N | H | G | N | S | Y | R | V | I | K | K |
| ABE4.2 | W | G | H | N | P | | R | N | L | S | V | N | H | G | N | S | Y | R | V | I | K | K |
| ABE4.3 | W | R | H | N | P | | R | N | F | S | V | N | Y | G | N | S | Y | R | V | F | K | K |
| ABE5.1 | W | R | L | N | P | | L | N | F | S | V | N | Y | G | A | C | Y | R | V | F | N | K |
| ABE5.2 | W | R | H | S | P | | R | N | F | S | V | N | Y | G | A | S | Y | R | V | F | K | T |
| ABE5.3 | W | R | L | N | P | | L | N | I | S | V | N | Y | G | A | C | Y | R | V | F | N | K |
| ABE5.4 | W | R | H | S | P | | R | N | F | S | V | N | Y | G | A | S | Y | R | V | F | K | T |
| ABE5.5 | W | R | L | N | P | | L | N | F | S | V | N | Y | G | A | C | Y | R | V | F | N | K |
| ABE5.6 | W | R | L | N | P | | L | N | F | S | V | N | Y | G | A | C | Y | R | V | F | N | K |
| ABE5.7 | W | R | L | N | P | | L | N | F | S | V | N | Y | G | A | C | Y | R | V | F | N | K |
| ABE5.8 | W | R | L | N | P | | L | N | F | S | V | N | Y | G | A | C | Y | R | V | F | N | K |
| ABE5.9 | W | R | L | N | P | | L | N | F | S | V | N | Y | G | A | C | Y | R | V | F | N | K |
| ABE5.10 | W | R | L | N | P | | L | N | F | S | V | N | Y | G | A | C | Y | R | V | F | N | K |
| ABE5.11 | W | R | L | N | P | | L | N | F | S | V | N | Y | G | A | C | Y | R | V | F | N | K |
| ABE5.12 | W | R | L | N | P | | L | N | F | S | V | N | Y | G | A | C | Y | R | V | F | N | K |
| ABE5.13 | W | R | H | N | P | | L | D | F | S | V | N | Y | A | A | S | Y | R | V | F | K | K |
| ABE5.14 | W | R | H | N | S | | L | N | F | C | V | N | Y | G | A | S | Y | R | V | F | K | K |
| ABE6.1 | W | R | H | N | S | | L | N | F | S | V | N | Y | G | N | S | Y | R | V | F | K | K |
| ABE6.2 | W | R | H | N | T | V | L | N | F | S | V | N | Y | G | N | S | Y | R | V | F | N | K |
| ABE6.3 | W | R | L | N | S | | L | N | F | S | V | N | Y | G | A | C | Y | R | V | F | N | K |
| ABE6.4 | W | R | L | N | S | | L | N | F | S | V | N | Y | G | N | C | Y | R | V | F | N | K |
| ABE6.5 | W | R | L | N | T | V | L | N | F | S | V | N | Y | G | A | C | Y | R | V | F | N | K |
| ABE6.6 | W | R | L | N | T | V | L | N | F | S | V | N | Y | G | N | C | Y | R | V | F | N | K |
| ABE7.1 | W | R | L | N | A | | L | N | F | S | V | N | Y | G | A | C | Y | R | V | F | N | K |
| ABE7.2 | W | R | L | N | A | | L | N | F | S | V | N | Y | G | N | C | Y | R | V | F | N | K |
| ABE7.3 | L | R | L | N | A | | L | N | F | S | V | N | Y | G | A | C | Y | R | V | F | N | K |
| ABE7.4 | R | R | L | N | A | | L | N | F | S | V | N | Y | G | A | C | Y | R | V | F | N | K |
| ABE7.5 | W | R | L | N | A | | L | N | F | S | V | N | Y | G | A | C | Y | H | V | F | N | K |
| ABE7.6 | W | R | L | N | A | | L | N | I | S | V | N | Y | G | A | C | Y | P | V | F | N | K |
| ABE7.7 | L | R | L | N | A | | L | N | F | S | V | N | Y | G | A | C | Y | P | V | F | N | K |
| ABE7.8 | L | R | L | N | A | | L | N | F | S | V | N | Y | G | N | C | Y | R | V | F | N | K |
| ABE7.9 | L | R | L | N | A | | L | N | F | S | V | N | Y | G | N | C | Y | P | V | F | N | K |
| ABE7.10 | R | R | L | N | A | | L | N | F | S | V | N | Y | G | A | C | Y | P | V | F | N | K |

[0678] In some embodiments, the base editor is an eighth generation ABE (ABE8). In some embodiments, the ABE8 contains a TadA*8 variant. In some embodiments, the ABE8 comprises a monomeric construct containing a TadA*8 variant (“ABE8.x-m”). In some embodiments, the ABE8 is ABE8.1-m, which has a monomeric construct containing TadA*7.10 with a Y147T mutation (TadA*8.1). In some embodiments, the ABE8 is ABE8.2-m, which has a monomeric construct containing TadA*7.10 with a Y147R mutation (TadA*8.2). In some embodiments, the ABE8 is ABE8.3-m, which has a monomeric construct containing TadA*7.10 with a Q154S mutation (TadA*8.3). In some embodiments, the ABE8 is ABE8.4-m, which has a monomeric construct containing TadA*7.10 with a Y123H mutation (TadA*8.4). In some embodiments, the ABE8 is ABE8.5-m, which has a monomeric construct containing TadA*7.10 with a V82S mutation (TadA*8.5). In some embodiments, the ABE8 is ABE8.6-m, which has a monomeric construct containing TadA*7.10 with a T166R mutation (TadA*8.6). In some embodiments, the ABE8 is ABE8.7-m, which has a monomeric construct containing TadA*7.10 with a Q154R mutation (TadA*8.7). In some embodiments, the ABE8 is ABE8.8-m, which has a monomeric construct containing TadA*7.10 with Y147R, Q154R, and Y123H mutations (TadA*8.8). In some embodiments, the ABE8 is ABE8.9-m, which has a monomeric construct containing TadA*7.10 with Y147R, Q154R and I76Y mutations (TadA*8.9). In some embodiments, the ABE8 is ABE8.10-m, which has a monomeric construct containing TadA*7.10 with Y147R, Q154R, and T166R mutations (TadA*8.10). In some embodiments, the ABE8 is ABE8.11-m, which has a monomeric construct containing TadA*7.10 with Y147T and Q154R mutations (TadA*8.11). In some embodiments, the ABE8 is ABE8.12-m, which has a monomeric construct containing TadA*7.10 with Y147T and Q154S mutations (TadA*8.12).

[0679] In some embodiments, the ABE8 is ABE8.13-m, which has a monomeric construct containing TadA*7.10 with Y123H (Y123H reverted from H123Y), Y147R, Q154R and I76Y mutations (TadA*8.13). In some embodiments, the ABE8 is ABE8.14-m, which has a monomeric construct containing TadA*7.10 with I76Y and V82S mutations (TadA*8.14). In some embodiments, the ABE8 is ABE8.15-m, which has a monomeric construct containing TadA*7.10 with V82S and Y147R mutations (TadA*8.15). In some embodiments, the ABE8 is ABE8.16-m, which has a monomeric construct containing TadA*7.10 with V82S, Y123H (Y123H reverted from H123Y) and Y147R mutations (TadA*8.16). In some embodiments, the ABE8 is ABE8.17-m, which has a monomeric construct containing TadA*7.10 with V82S and Q154R mutations (TadA*8.17). In some embodiments, the ABE8 is ABE8.18-m, which has a monomeric construct containing TadA*7.10 with V82S, Y123H (Y123H reverted from H123Y) and Q154R mutations (TadA*8.18). In some embodiments, the ABE8 is ABE8.19-m, which has a monomeric construct containing TadA*7.10 with V82S, Y123H (Y123H reverted from H123Y), Y147R and Q154R mutations (TadA*8.19). In some embodiments, the ABE8 is ABE8.20-m, which has a monomeric construct containing TadA*7.10 with I76Y, V82S, Y123H (Y123H reverted from H123Y), Y147R and Q154R mutations (TadA*8.20). In some embodiments, the ABE8 is ABE8.21-m, which has a monomeric construct containing TadA*7.10 with Y147R and Q154S mutations (TadA*8.21). In some embodiments, the ABE8 is ABE8.22-m, which has a monomeric construct containing TadA*7.10 with V82S and Q154S mutations (TadA*8.22). In some embodiments, the ABE8 is ABE8.23-m, which has a monomeric construct containing TadA*7.10 with V82S and Y123H (Y123H reverted from H123Y) mutations (TadA*8.23). In some embodiments, the ABE8 is ABE8.24-m, which has a monomeric construct containing TadA*7.10 with V82S, Y123H (Y123H reverted from H123Y), and Y147T mutations (TadA*8.24).

[0680] In some embodiments, the ABE8 has a heterodimeric construct containing wild-type E. coli TadA fused to a TadA*8 variant (“ABE8.x-d”). In some embodiments, the ABE8 is ABE8.1-d, which has a heterodimeric construct containing wild-type E. coli TadA fused to TadA*7.10 with a Y147T mutation (TadA*8.1). In some embodiments, the ABE8 is ABE8.2-d, which has a heterodimeric construct containing wild-type E. coli TadA fused to TadA*7.10 with a Y147R mutation (TadA*8.2). In some embodiments, the ABE8 is ABE8.3-d, which has a heterodimeric construct containing wild-type E. coli TadA fused to TadA*7.10 with a Q154S mutation (TadA*8.3). In some embodiments, the ABE8 is ABE8.4-d, which has a heterodimeric construct containing wild-type E. coli TadA fused to TadA*7.10 with a Y123H mutation (TadA*8.4). In some embodiments, the ABE8 is ABE8.5-d, which has a heterodimeric construct containing wild-type E. coli TadA fused to TadA*7.10 with a V82S mutation (TadA*8.5). In some embodiments, the ABE8 is ABE8.6-d, which has a heterodimeric construct containing wild-type E. coli TadA fused to TadA*7.10 with a T166R mutation (TadA*8.6). In some embodiments, the ABE8 is ABE8.7-d, which has a heterodimeric construct containing wild-type E. coli TadA fused to TadA*7.10 with a Q154R mutation (TadA*8.7). In some embodiments, the ABE8 is ABE8.8-d, which has a heterodimeric construct containing wild-type E. coli TadA fused to TadA*7.10 with Y147R, Q154R, and Y123H mutations (TadA*8.8). In some embodiments, the ABE8 is ABE8.9-d, which has a heterodimeric construct containing wild-type E. coli TadA fused to TadA*7.10 with Y147R, Q154R and I76Y mutations (TadA*8.9). In some embodiments, the ABE8 is ABE8.10-d, which has a heterodimeric construct containing wild-type E. coli TadA fused to TadA*7.10 with Y147R, Q154R, and T166R mutations (TadA*8.10). In some embodiments, the ABE8 is ABE8.11-d, which has a heterodimeric construct containing wild-type E. coli TadA fused to TadA*7.10 with Y147T and Q154R mutations (TadA*8.11). In some embodiments, the ABE8 is ABE8.12-d, which has heterodimeric construct containing wild-type E. coli TadA fused to TadA*7.10 with Y147T and Q154S mutations (TadA*8.12). In some embodiments, the ABE8 is ABE8.13-d, which has a heterodimeric construct containing wild-type E. coli TadA fused to TadA*7.10 with Y123H (Y123H reverted from H123Y), Y147R, Q154R and I76Y mutations (TadA*8.13). In some embodiments, the ABE8 is ABE8.14-d, which has a heterodimeric construct containing wild-type E. coli TadA fused to TadA*7.10 with I76Y and V82S mutations (TadA*8.14). In some embodiments, the ABE8 is ABE8.15-d, which has a heterodimeric construct containing wild-type E. coli TadA fused to TadA*7.10 with V82S and Y147R mutations (TadA*8.15). In some embodiments, the ABE8 is ABE8.16-d, which has a heterodimeric construct containing wild-type E. coli TadA fused to TadA*7.10 with V82S, Y123H (Y123H reverted from H123Y) and Y147R mutations (TadA*8.16). In some embodiments, the ABE8 is ABE8.17-d, which has a heterodimeric construct containing wild-type E. coli TadA fused to TadA*7.10 with V82S and Q154R mutations (TadA*8.17). In some embodiments, the ABE8 is ABE8.18-d, which has a heterodimeric construct containing wild-type E. coli TadA fused to TadA*7.10 with V82S, Y123H (Y123H reverted from H123Y) and Q154R mutations (TadA*8.18). In some embodiments, the ABE8 is ABE8.19-d, which has a heterodimeric construct containing wild-type E. coli TadA fused to TadA*7.10 with V82S, Y123H (Y123H reverted from H123Y), Y147R and Q154R mutations (TadA*8.19). In some embodiments, the ABE8 is ABE8.20-d, which has a heterodimeric construct containing wild-type E. coli TadA fused to TadA*7.10 with I76Y, V82S, Y123H (Y123H reverted from H123Y), Y147R and Q154R mutations (TadA*8.20). In some embodiments, the ABE8 is ABE8.21-d, which has a heterodimeric construct containing wild-type E. coli TadA fused to TadA*7.10 with Y147R and Q154S mutations (TadA*8.21). In some embodiments, the ABE8 is ABE8.22-d, which has a heterodimeric construct containing wild-type E. coli TadA fused to TadA*7.10 with V82S and Q154S mutations (TadA*8.22). In some embodiments, the ABE8 is ABE8.23-d, which has a heterodimeric construct containing wild-type E. coli TadA fused to TadA*7.10 with V82S and Y123H (Y123H reverted from H123Y) mutations (TadA*8.23). In some embodiments, the ABE8 is ABE8.24-d, which has a heterodimeric construct containing wild-type E. coli TadA fused to TadA*7.10 with V82S, Y123H (Y123H reverted from H123Y), and Y147T mutations (TadA*8.24).

[0681] In some embodiments, the ABE8 has a heterodimeric construct containing TadA*7.10 fused to a TadA*8 variant (“ABE8.x-7”). In some embodiments, the ABE8 is ABE8.1-7, which has a heterodimeric construct containing TadA*7.10 fused to TadA*7.10 with a Y147T mutation (TadA*8.1). In some embodiments, the ABE8 is ABE8.2-7, which has a heterodimeric construct containing TadA*7.10 fused to TadA*7.10 with a Y147R mutation (TadA*8.2). In some embodiments, the ABE8 is ABE8.3-7, which has a heterodimeric construct containing TadA*7.10 fused to TadA*7.10 with a Q154S mutation (TadA*8.3). In some embodiments, the ABE8 is ABE8.4-7, which has a heterodimeric construct containing TadA*7.10 fused to TadA*7.10 with a Y123H mutation (TadA*8.4). In some embodiments, the ABE8 is ABE8.5-7, which has a heterodimeric construct containing TadA*7.10 fused to TadA*7.10 with a V82S mutation (TadA*8.5). In some embodiments, the ABE8 is ABE8.6-7, which has a heterodimeric construct containing TadA*7.10 fused to TadA*7.10 with a T166R mutation (TadA*8.6). In some embodiments, the ABE8 is ABE8.7-7, which has a heterodimeric construct containing TadA*7.10 fused to TadA*7.10 with a Q154R mutation (TadA*8.7). In some embodiments, the ABE8 is ABE8.8-7, which has a heterodimeric construct containing TadA*7.10 fused to TadA*7.10 with Y147R, Q154R, and Y123H mutations (TadA*8.8). In some embodiments, the ABE8 is ABE8.9-7, which has a heterodimeric construct containing TadA*7.10 fused to TadA*7.10 with Y147R, Q154R and I76Y mutations (TadA*8.9). In some embodiments, the ABE8 is ABE8.10-7, which has a heterodimeric construct containing TadA*7.10 fused to TadA*7.10 with Y147R, Q154R, and T166R mutations (TadA*8.10). In some embodiments, the ABE8 is ABE8.11-7, which has a heterodimeric construct containing TadA*7.10 fused to TadA*7.10 with Y147T and Q154R mutations (TadA*8.11). In some embodiments, the ABE8 is ABE8.12-7, which has a heterodimeric construct containing TadA*7.10 fused to TadA*7.10 with Y147T and Q154S mutations (TadA*8.12). In some embodiments, the ABE8 is ABE8.13-7, which has a heterodimeric construct containing TadA*7.10 fused to TadA*7.10 with Y123H (Y123H reverted from H123Y), Y147R, Q154R and I76Y mutations (TadA*8.13). In some embodiments, the ABE8 is ABE8.14-7, which has a heterodimeric construct containing TadA*7.10 fused to TadA*7.10 with I76Y and V82S mutations (TadA*8.14). In some embodiments, the ABE8 is ABE8.15-7, which has a heterodimeric construct containing TadA*7.10 fused to TadA*7.10 with V82S and Y147R mutations (TadA*8.15). In some embodiments, the ABE8 is ABE8.16-7, which has a heterodimeric construct containing TadA*7.10 fused to TadA*7.10 with V82S, Y123H (Y123H reverted from H123Y) and Y147R mutations (TadA*8.16). In some embodiments, the ABE8 is ABE8.17-7, which has a heterodimeric construct containing TadA*7.10 fused to TadA*7.10 with V82S and Q154R mutations (TadA*8.17). In some embodiments, the ABE8 is ABE8.18-7, which has a heterodimeric construct containing TadA*7.10 fused to TadA*7.10 with V82S, Y123H (Y123H reverted from H123Y) and Q154R mutations (TadA*8.18). In some embodiments, the ABE8 is ABE8.19-7, which has a heterodimeric construct containing TadA*7.10 fused to TadA*7.10 with V82S, Y123H (Y123H reverted from H123Y), Y147R and Q154R mutations (TadA*8.19). In some embodiments, the ABE8 is ABE8.20-7, which has a heterodimeric construct containing TadA*7.10 fused to TadA*7.10 with I76Y, V82S, Y123H (Y123H reverted from H123Y), Y147R and Q154R mutations (TadA*8.20). In some embodiments, the ABE8 is ABE8.21-7, which has a heterodimeric construct containing TadA*7.10 fused to TadA*7.10 with Y147R and Q154S mutations (TadA*8.21). In some embodiments, the ABE8 is ABE8.22-7, which has a heterodimeric construct containing TadA*7.10 fused to TadA*7.10 with V82S and Q154S mutations (TadA*8.22). In some embodiments, the ABE8 is ABE8.23-7, which has a heterodimeric construct containing TadA*7.10 fused to TadA*7.10 with V82S and Y123H (Y123H reverted from H123Y) mutations (TadA*8.23). In some embodiments, the ABE8 is ABE8.24-7, which has a heterodimeric construct containing TadA*7.10 fused to TadA*7.10 with V82S, Y123H (Y123H reverted from H123Y), and Y147T mutations (TadA*8.24

[0682] In some embodiments, the ABE is ABE8.1-m, ABE8.2-m, ABE8.3-m, ABE8.4-m, ABE8.5-m, ABE8.6-m, ABE8.7-m, ABE8.8-m, ABE8.9-m, ABE8.10-m, ABE8.11-m, ABE8.12-m, ABE8.13-m, ABE8.14-m, ABE8.15-m, ABE8.16-m, ABE8.17-m, ABE8.18-m, ABE8.19-m, ABE8.20-m, ABE8.21-m, ABE8.22-m, ABE8.23-m, ABE8.24-m, ABE8.1-d, ABE8.2-d, ABE8.3-d, ABE8.4-d, ABE8.5-d, ABE8.6-d, ABE8.7-d, ABE8.8-d, ABE8.9-d, ABE8.10-d, ABE8.11-d, ABE8.12-d, ABE8.13-d, ABE8.14-d, ABE8.15-d, ABE8.16-d, ABE8.17-d, ABE8.18-d, ABE8.19-d, ABE8.20-d, ABE8.21-d, ABE8.22-d, ABE8.23-d, or ABE8.24-d as shown in Table 10 below.

TABLE 10
ABE8 base editors

| | Adenosine | |
|---|---|---|
| ABE8 | Deaminase | Adenosine Deaminase Description |
| ABE8.1-m | TadA*8.1 | Monomer_TadA*7.10 + Y147T |
| ABE8.2-m | TadA*8.2 | Monomer_TadA*7.10 + Y147R |
| ABE8.3-m | TadA*8.3 | Monomer_TadA*7.10 + Q154S |
| ABE8.4-m | TadA*8.4 | Monomer_TadA*7.10 + Y123H |
| ABE8.5-m | TadA*8.5 | Monomer_TadA*7.10 + V82S |
| ABE8.6-m | TadA*8.6 | Monomer_TadA*7.10 + T166R |
| ABE8.7-m | TadA*8.7 | Monomer_TadA*7.10 + Q154R |
| ABE8.8-m | TadA*8.8 | Monomer_TadA*7.10 + Y147R_Q154R_Y123H |
| ABE8.9-m | TadA*8.9 | Monomer_TadA*7.10 + Y147R_Q154R_I76Y |
| ABE8.10-m | TadA*8.10 | Monomer_TadA*7.10 + Y147R_Q154R_T166R |
| ABE8.11-m | TadA*8.11 | Monomer_TadA*7.10 + Y147T_Q154R |
| ABE8.12-m | TadA*8.12 | Monomer_TadA*7.10 + Y147T_Q154S |
| ABE8.13-m | TadA*8.13 | Monomer_TadA*7.10 + Y123H_Y147R_Q154R_I76Y |
| ABE8.14-m | TadA*8.14 | Monomer_TadA*7.10 + I76Y_V82S |
| ABE8.15-m | TadA*8.15 | Monomer_TadA*7.10 + V82S_Y147R |
| ABE8.16-m | TadA*8.16 | Monomer_TadA*7.10 + V82S_Y123H_Y147R |
| ABE8.17-m | TadA*8.17 | Monomer_TadA*7.10 + V82S_Q154R |
| ABE8.18-m | TadA*8.18 | Monomer_TadA*7.10 + V82S_Y123H_Q154R |
| ABE8.19-m | TadA*8.19 | Monomer_TadA*7.10 + V82S_Y123H_Y147R_Q154R |
| ABE8.20-m | TadA*8.20 | Monomer_TadA*7.10 + I76Y_V82S_Y123H_Y147R_Q154R |
| ABE8.21-m | TadA*8.21 | Monomer_TadA*7.10 + Y147R_Q154S |
| ABE8.22-m | TadA*8.22 | Monomer_TadA*7.10 + V82S_Q154S |
| ABE8.23-m | TadA*8.23 | Monomer_TadA*7.10 + V82S_Y123H |
| ABE8.24-m | TadA*8.24 | Monomer_TadA*7.10 + V82S_Y123H_Y147T |
| ABE8.1-d | TadA*8.1 | Heterodimer_(WT) + (TadA*7.10 + Y147T) |
| ABE8.2-d | TadA*8.2 | Heterodimer_(WT) + (TadA*7.10 + Y147R) |
| ABE8.3-d | TadA*8.3 | Heterodimer_(WT) + (TadA*7.10 + Q154S) |
| ABE8.4-d | TadA*8.4 | Heterodimer_(WT) + (TadA*7.10 + Y123H) |
| ABE8.5-d | TadA*8.5 | Heterodimer_(WT) + (TadA*7.10 + V82S) |
| ABE8.6-d | TadA*8.6 | Heterodimer_(WT) + (TadA*7.10 + T166R) |
| ABE8.7-d | TadA*8.7 | Heterodimer_(WT) + (TadA*7.10 + Q154R) |
| ABE8.8-d | TadA*8.8 | Heterodimer_(WT) + (TadA*7.10 + Y147R_Q154R_Y123H) |
| ABE8.9-d | TadA*8.9 | Heterodimer_(WT) + (TadA*7.10 + Y147R_Q154R_I76Y) |
| ABE8.10-d | TadA*8.10 | Heterodimer_(WT) + (TadA*7.10 + Y147R_Q154R_T166R) |
| ABE8.11-d | TadA*8.11 | Heterodimer_(WT) + (TadA*7.10 + Y147T_Q154R) |
| ABE8.12-d | TadA*8.12 | Heterodimer_(WT) + (TadA*7.10 + Y147T_Q154S) |
| ABE8.13-d | TadA*8.13 | Heterodimer_(WT) + (TadA*7.10 + Y123H_Y147T_Q154R_I76Y) |
| ABE8.14-d | TadA*8.14 | Heterodimer_(WT) + (TadA*7.10 + I76Y_V82S) |
| ABE8.15-d | TadA*8.15 | Heterodimer_(WT) + (TadA*7.10 + V82S_ Y147R) |
| ABE8.16-d | TadA*8.16 | Heterodimer_(WT) + (TadA*7.10 + V82S_Y123H_Y147R) |
| ABE8.17-d | TadA*8.17 | Heterodimer_(WT) + (TadA*7.10 + V82S_Q154R) |
| ABE8.18-d | TadA*8.18 | Heterodimer_(WT) + (TadA*7.10 + V82S_Y123H_Q154R) |
| ABE8.19-d | TadA*8.19 | Heterodimer_(WT) + (TadA*7.10 + V82S_Y123H_Y147R_Q154R) |
| ABE8.20-d | TadA*8.20 | Heterodimer_(WT) + (TadA*7.10 + I76Y_V82S_Y123H_Y147R_Q154R) |
| ABE8.21-d | TadA*8.21 | Heterodimer_(WT) + (TadA*7.10 + Y147R_Q154S) |
| ABE8.22-d | TadA*8.22 | Heterodimer_(WT) + (TadA*7.10 + V82S_Q154S) |
| ABE8.23-d | TadA*8.23 | Heterodimer_(WT) + (TadA*7.10 + V82S_Y123H) |
| ABE8.24-d | TadA*8.24 | Heterodimer_(WT) + (TadA*7.10 + V82S_Y123H_Y147T) |

[0683] In some embodiments, the ABE8 is ABE8a-m, which has a monomeric construct containing TadA*7.10 with R26C, A109S, T111R, D119N, H122N, Y147D, F149Y, T166I, and D167N mutations (TadA*8a). In some embodiments, the ABE8 is ABE8b-m, which has a monomeric construct containing TadA*7.10 with V88A, A109S, T111R, D119N, H122N, F149Y, T166I, and D167N mutations (TadA*8b). In some embodiments, the ABE8 is ABE8c-m, which has a monomeric construct containing TadA*7.10 with R26C, A109S, T111R, D119N, H122N, F149Y, T166I, and D167N mutations (TadA*8c). In some embodiments, the ABE8 is ABE8d-m, which has a monomeric construct containing TadA*7.10 with V88A, T111R, D119N, and F149Y mutations (TadA*8d). In some embodiments, the ABE8 is ABE8e-m, which has a monomeric construct containing TadA*7.10 with A109S, T111R, D119N, H122N, Y147D, F149Y, T166I, and D167N mutations (TadA*8e).

[0684] In some embodiments, the ABE8 is ABE8a-d, which has a heterodimeric construct containing wild-type E. coli TadA fused to TadA*7.10 with R26C, A109S, T111R, D119, H122N, Y147D, F149Y, T166I, and D167N mutations (TadA*8a). In some embodiments, the ABE8 is ABE8b-d, which has a heterodimeric construct containing wild-type E. coli TadA fused to TadA*7.10 with V88A, A109S, T111R, D119N, H122N, F149Y, T166I, and D167N mutations (TadA*8b). In some embodiments, the ABE8 is ABE8c-d, which has a heterodimeric construct containing wild-type E. coli TadA fused to TadA*7.10 with R26C, A109S, T111R, D119N, H122N, F149Y, T166I, and D167N mutations (TadA*8c). In some embodiments, the ABE8 is ABE8d-d, which has a heterodimeric construct containing wild-type E. coli TadA fused to TadA*7.10 with V88A, T111R, D119N, and F149Y mutations (TadA*8d). In some embodiments, the ABE8 is ABE8e-d, which has a heterodimeric construct containing wild-type E. coli TadA fused to TadA*7.10 with A109S, T111R, D119N, H122N, Y147D, F149Y, T166I, and D167N mutations (TadA*8e).

[0685] In some embodiments, the ABE8 is ABE8a-7, which has a heterodimeric construct containing TadA*7.10 fused to TadA*7.10 with R26C, A109S, T111R, D119, H122N, Y147D, F149Y, T166I, and D167N mutations (TadA*8a). In some embodiments, the ABE8 is ABE8b-7, which has a heterodimeric construct containing TadA*7.10 fused to TadA*7.10 with V88A, A109S, T111R, D119N, H122N, F149Y, T166I, and D167N mutations (TadA*8b). In some embodiments, the ABE8 is ABE8c-7, which has a heterodimeric construct containing TadA*7.10 fused to TadA*7.10 with R26C, A109S, T111R, D119N, H122N, F149Y, T166I, and D167N mutations (TadA*8c). In some embodiments, the ABE8 is ABE8d-7, which has a heterodimeric construct containing TadA*7.10 fused to TadA*7.10 with V88A, T111R, D119N, and F149Y mutations (TadA*8d). In some embodiments, the ABE8 is ABE8e-7, which has a heterodimeric construct containing TadA*7.10 fused to TadA*7.10 with A109S, T111R, D119N, H122N, Y147D, F149Y, T166I, and D167N mutations (TadA*8e).

[0686] In some embodiments, the ABE is ABE8a-m, ABE8b-m, ABE8c-m, ABE8d-m, ABE8e-m, ABE8a-d, ABE8b-d, ABE8c-d, ABE8d-d, or ABE8e-d, as shown in Table 11 below. In some embodiments, the ABE is ABE8e-m or ABE8e-d. ABE8e shows efficient adenine base editing activity and low indel formation when used with Cas homologues other than SpCas9, for example, SaCas9, SaCas9-KKH, Cas12a homologues, e.g., LbCas12a, enAs-Cas12a, SpCas9-NG and circularly permuted CP1028-SpCas9 and CP1041-SpCas9. In addition to the mutations shown for ABE8e in Table 11, off-target RNA and DNA editing were reduced by introducing a V106W substitution into the TadA domain (as described in M. Richter et al., 2020, Nature Biotechnology, doi.org/10.1038/s41587-020-0453-z, the entire contents of which are incorporated by reference herein).

TABLE 11
Additional Adenosine Deaminase Base Editor 8 Variants

| ABE8 Base | Adenosine | |
|---|---|---|
| Editor | Deaminase | Adenosine Deaminase Description |
| ABE8a-m | TadA*8a | Monomer_TadA*7.10 + R26C + A109S + T111R + D119N + |
| | | H122N + Y147D + F149Y + T166I + D167N |
| ABE8b-m | TadA*8b | Monomer_TadA*7.10 + V88A + A109S + T111R + D119N + |
| | | H122N + F149Y + T166I + D167N |
| ABE8c-m | TadA*8c | Monomer_TadA*7.10 + R26C + A109S + T111R + D119N + |
| | | H122N + F149Y + T166I + D167N |
| ABE8d-m | TadA*8d | Monomer_TadA*7.10 + V88A + T111R + D119N + F149Y |
| ABE8e-m | TadA*8e | Monomer_TadA*7.10 + A109S + T111R + D119N + H122N + |
| | | Y147D + F149Y + T166I + D167N |
| ABE8a-d | TadA*8a | Heterodimer_(WT) + (TadA*7.10 + R26C + A109S + T111R + |
| | | D119N + H122N + Y147D + F149Y + T166I + D167N) |
| ABE8b-d | TadA*8b | Heterodimer_(WT) + (TadA*7.10 + V88A + A109S + T111R + |
| | | D119N + H122N + F149Y + T166I + D167N) |
| ABE8c-d | TadA*8c | Heterodimer_(WT) + (TadA*7.10 + R26C + A109S + T111R + |
| | | D119N + H122N + F149Y + T166I + D167N) |
| ABE8d-d | TadA*8d | Heterodimer_(WT) + (TadA*7.10 + V88A + T111R + D119N + |
| | | F149Y) |
| ABE8e-d | TadA*8e | Heterodimer_(WT) + (TadA*7.10 + A109S + T111R + D119N + |
| | | H122N + Y147D + F149Y + T166I + D167N) |

[0687] In some embodiments, base editors (e.g., ABE9) are generated by cloning an adenosine deaminase variant (e.g., TadA*9) into a scaffold that includes a circular permutant Cas9 (e.g., CP5 or CP6) and a bipartite nuclear localization sequence. In some embodiments, the base editor (e.g., ABE7.9, ABE7.10, ABE8, or ABE9) is a NGC PAM CP5 variant (S. pyrogenes Cas9 or spVRQR Cas9). In some embodiments, the base editor (e.g., ABE7.9, ABE7.10, ABE8, or ABE9) is an AGA PAM CP5 variant (S. pyrogenes Cas9 or spVRQR Cas9). In some embodiments, the base editor (e.g., ABE7.9, ABE7.10, or ABE8) is an NGC PAM CP6 variant (S. pyrogenes Cas9 or spVRQR Cas9). In some embodiments, the base editor (e.g. ABE7.9, ABE7.10, or ABE8) is an AGA PAM CP6 variant (S. pyrogenes Cas9 or spVRQR Cas9).

[0688] In some embodiments, the ABE has a genotype as shown in Table 12 below.

TABLE 12
Genotypes of ABEs

| | | | | | | | | | | | | | | | | | | | | | |
|---|---|---|---|---|---|---|---|---|---|---|---|---|---|---|---|---|---|---|---|---|---|
| 23 | 26 | 36 | 37 | 48 | 49 | 51 | 72 | 84 | 87 | 105 | 108 | 123 | 125 | 142 | 145 | 147 | 152 | 155 | 156 | 157 | 161 |

| | | | | | | | | | | | | | | | | | | | | | |
|---|---|---|---|---|---|---|---|---|---|---|---|---|---|---|---|---|---|---|---|---|---|
| ABE7.9 | L | R | L | N | A | L | N | F | S | V | N | Y | G | N | C | Y | P | V | F | N | K |
| ABE7.10 | R | R | L | N | A | L | N | F | S | V | N | Y | G | A | C | Y | P | V | F | N | K |

[0689] As shown in Table 13 below, genotypes of 40 ABE8s are described. Residue positions in the evolved E. coli TadA portion of ABE are indicated. Mutational changes in ABE8 are shown when distinct from ABE7.10 mutations. In some embodiments, the ABE has a genotype of one of the ABEs as shown in Table 13 below.

TABLE 13
Residue Identity in Evolved TadA

| | 23 | 36 | 48 | 51 | 76 | 82 | 84 | 106 | 108 | 123 | 146 | 147 | 152 | 154 | 155 | 156 | 157 | 166 |
|---|---|---|---|---|---|---|---|---|---|---|---|---|---|---|---|---|---|---|
| ABE7.10 | R | L | A | L | I | V | F | V | N | Y | C | Y | P | Q | V | F | N | T |
| ABE8.1-m | | | | | | | | | | | | T | | | | | | |
| ABE8.2-m | | | | | | | | | | | | R | | | | | | |
| ABE8.3-m | | | | | | | | | | | | | | S | | | | |
| ABE8.4-m | | | | | | | | | | H | | | | | | | | |
| ABE8.5-m | | | | | | S | | | | | | | | | | | | |
| ABE8.6-m | | | | | | | | | | | | | | | | | | R |
| ABE8.7-m | | | | | | | | | | | | | | R | | | | |
| ABE8.8-m | | | | | | | | | | H | | R | | R | | | | |
| ABE8.9-m | | | | | Y | | | | | | | R | | R | | | | |
| ABE8.10-m | | | | | | | | | | | | R | | R | | | | R |
| ABE8.11-m | | | | | | | | | | | | T | | R | | | | |
| ABE8.12-m | | | | | | | | | | | | T | | S | | | | |
| ABE8.13-m | | | | | Y | | | | | H | | R | | R | | | | |
| ABE8.14-m | | | | | Y | S | | | | | | | | | | | | |
| ABE8.15-m | | | | | | S | | | | | | R | | | | | | |
| ABE8.16-m | | | | | | S | | | | H | | R | | | | | | |
| ABE8.17-m | | | | | | S | | | | | | | | R | | | | |
| ABE8.18-m | | | | | | S | | | | H | | | | R | | | | |
| ABE8.19-m | | | | | | S | | | | H | | R | | R | | | | |
| ABE8.20-m | | | | | Y | S | | | | H | | R | | R | | | | |
| ABE8.21-m | | | | | | | | | | | | R | | S | | | | |
| ABE8.22-m | | | | | | S | | | | | | | | S | | | | |
| ABE8.23-m | | | | | | S | | | | H | | | | | | | | |
| ABE8.24-m | | | | | | S | | | | H | | T | | | | | | |
| ABE8.1-d | | | | | | | | | | | | T | | | | | | |
| ABE8.2-d | | | | | | | | | | | | R | | | | | | |
| ABE8.3-d | | | | | | | | | | | | | | S | | | | |
| ABE8.4-d | | | | | | | | | | H | | | | | | | | |
| ABE8.5-d | | | | | | S | | | | | | | | | | | | |
| ABE8.6-d | | | | | | | | | | | | | | | | | | R |
| ABE8.7-d | | | | | | | | | | | | | | R | | | | |
| ABE8.8-d | | | | | | | | | | H | | R | | R | | | | |
| ABE8.9-d | | | | | Y | | | | | | | R | | R | | | | |
| ABE8.10-d | | | | | | | | | | | | R | | R | | | | R |
| ABE8.11-d | | | | | | | | | | | | T | | R | | | | |
| ABE8.12-d | | | | | | | | | | | | T | | S | | | | |
| ABE8.13-d | | | | | Y | | | | | H | | R | | R | | | | |
| ABE8.14-d | | | | | Y | S | | | | | | | | | | | | |
| ABE8.15-d | | | | | | S | | | | | | R | | | | | | |
| ABE8.16-d | | | | | | S | | | | H | | R | | | | | | |
| ABE8.17-d | | | | | | S | | | | | | | | R | | | | |
| ABE8.18-d | | | | | | S | | | | H | | | | R | | | | |
| ABE8.19-d | | | | | | S | | | | H | | R | | R | | | | |
| ABE8.20-d | | | | | Y | S | | | | H | | R | | R | | | | |
| ABE8.21-d | | | | | | | | | | | | R | | S | | | | |
| ABE8.22-d | | | | | | S | | | | | | | | S | | | | |
| ABE8.23-d | | | | | | S | | | | H | | | | | | | | |
| ABE8.24-d | | | | | | S | | | | H | | T | | | | | | |

[0690] In some embodiments, the base editor is ABE8.1, which comprises or consists essentially of the following sequence or a fragment thereof having adenosine deaminase activity:

### ABE8.1_Y147T_CP5_NGC PAM_monomer

MSEVEFSHEYWMRHALTLAKRARDEREVPVGAVLVLNNRVIGEGWNRAIGLHDPTAHAEIMA
LRQGGLVMONYRLIDATLYVTFEPCVMCAGAMIHSRIGRVVFGVRNAKTGAAGSLMDVLHYP
GMNHRVEITEGILADECAALLCTFFRMPRQVFNAQKKAQSSTD [symbol] [symbol]
EIGKATAKYFFYSNIMNFFKTEITLANGEIRKRPLIETNGETGEIVWDK
GRDFATVRKVLSMPQVNIVKKTEVQTGGFSKESILPKRNSDKLIARKKDWDPKKYGGFMQPT
VAYSVLVVAKVEKGKSKKLKSVKELLGITIMERSSFEKNPIDFLEAKGYKEVKKDLIIKLPK
YSLFELENGRKRMLASAKFLQKGNELALPSKYVNFLYLASHYEKLKGSPEDNEQKQLFVEQH
KHYLDEIIEQISEFSKRVILADANLDKVLSAYNKHRDKPIREQAENIIHLFTLTNLGAPRAF
KYFDTTIARKEYRSTKEVLDATLIHQSITGLYETRIDLSQLGGD [symbol] [symbol]
DKKYSIGLAIGTNSVGWAVITDEYKVPSKKFKVLGNTDRHSIKKNLIGALLFDSGETAE
ATRLKRTARRRYTRRKNRICYLQEIFSNEMAKVDDSFFHRLEESFLVEEDKKHERHPIFGNI
VDEVAYHEKYPTIYHLRKKLVDSTDKADLRLIYLALAHMIKFRGHFLIEGDLNPDNSDVDKL
FIQLVQTYNQLFEENPINASGVDAKAILSARLSKSRRLENLIAQLPGEKKNGLFGNLIALSL
GLTPNFKSNFDLAEDAKLQLSKDTYDDDLDNLLAQIGDQYADLFLAAKNLSDAILLSDILRV
NTEITKAPLSASMIKRYDEHHQDLTLLKALVRQQLPEKYKEIFFDQSKNGYAGYIDGGASQE
EFYKFIKPILEKMDGTEELLVKLNREDLLRKQRTFDNGSIPHQIHLGELHAILRRQEDFYPE
LKDNREKIEKILTFRIPYYVGPLARGNSRFAWMTRKSEETITPWNFEEVVDKGASAQSFIER
MTNFDKNLPNEKVLPKHSLLYEYFTVYNELTKVKYVTEGMRKPAFLSGEQKKAIVDLLFKTN
RKVTVKQLKEDYFKKIECFDSVEISGVEDRFNASLGTYHDLLKIIKDKDFLDNEENEDILED
IVLTLTLFEDREMIEERLKTYAHLFDDKVMKQLKRRRYTGWGRLSRKLINGIRDKQSGKTIL
DFLKSDGFANRNFMQLIHDDSLTFKEDIQKAQVSGQGDSLHEHIANLAGSPAIKKGILQTVK
VVDELVKVMGRHKPENIVIEMARENQTTQKGQKNSRERMKRIEEGIKELGSQILKEHPVENT
QLQNEKLYLYYLQNGRDMYVDQELDINRLSDYDVDHIVPQSFLKDDSIDNKVLTRSDKNRGK
SDNVPSEEVVKKMKNYWRQLLNAKLITQRKFDNLTKAERGGLSELDKAGFIKRQLVETRQIT
KHVAQILDSRMNTKYDENDKLIREVKVITLKSKLVSDFRKDFQFYKVREINNYHHAHDAYLN
AVVGTALIKKYPKLESEFVYGDYKVYDVRKMIAKSEQEGADKRTADGSEFESPKKKRKV*

In the above sequence, the plain text denotes an adenosine deaminase sequence, bold sequence indicates sequence derived from Cas9, the italics sequence denotes a linker sequence, and the underlined sequence denotes a bipartite nuclear localization sequence.

[0692] In some embodiments, the base editor is ABE8.1, which comprises or consists essentially of the following sequence or a fragment thereof having adenosine deaminase activity:

pNMG-B335 ABE8.1_Y147T_CP5_NGC PAM_monomer:

MSEVEFSHEYWMRHALTLAKRARDEREVPVGAVLVLNNRVIGEGWNRAIGLHDPTAHAEIMA
LRQGGLVMONYRLIDATLYVTFEPCVMCAGAMIHSRIGRVVFGVRNAKTGAAGSLMDVLHYP
GMNHRVEITEGILADECAALLCTFFRMPRQVFNAQKKAQSSTDSGGSSGGSSGSETPGTSES
ATPESSGGSSGGSEIGKATAKYFFYSNIMNFFKTEITLANGEIRKRPLIETNGETGEIVWDK
GRDFATVRKVLSMPQVNIVKKTEVQTGGFSKESILPKRNSDKLIARKKDWDPKKYGGFMQPT
VAYSVLVVAKVEKGKSKKLKSVKELLGITIMERSSFEKNPIDFLEAKGYKEVKKDLIIKLPK
YSLFELENGRKRMLASAKFLQKGNELALPSKYVNFLYLASHYEKLKGSPEDNEQKQLFVEQH
KHYLDEIIEQISEFSKRVILADANLDKVLSAYNKHRDKPIREQAENIIHLFTLTNLGAPRAF
KYFDTTIARKEYRSTKEVLDATLIHQSITGLYETRIDLSQLGGDGGSGGSGGSGGSGGSGGS
GGMDKKYSIGLAIGTNSVGWAVITDEYKVPSKKFKVLGNTDRHSIKKNLIGALLFDSGETAE
ATRLKRTARRRYTRRKNRICYLQEIFSNEMAKVDDSFFHRLEESFLVEEDKKHERHPIFGNI
VDEVAYHEKYPTIYHLRKKLVDSTDKADLRLIYLALAHMIKFRGHFLIEGDLNPDNSDVDKL
FIQLVQTYNQLFEENPINASGVDAKAILSARLSKSRRLENLIAQLPGEKKNGLFGNLIALSL
GLTPNFKSNFDLAEDAKLQLSKDTYDDDLDNLLAQIGDQYADLFLAAKNLSDAILLSDILRV
NTEITKAPLSASMIKRYDEHHQDLTLLKALVRQQLPEKYKEIFFDQSKNGYAGYIDGGASQE
EFYKFIKPILEKMDGTEELLVKLNREDLLRKQRTFDNGSIPHQIHLGELHAILRRQEDFYPE
LKDNREKIEKILTFRIPYYVGPLARGNSRFAWMTRKSEETITPWNFEEVVDKGASAQSFIER
MTNFDKNLPNEKVLPKHSLLYEYFTVYNELTKVKYVTEGMRKPAFLSGEQKKAIVDLLFKTN
RKVTVKQLKEDYFKKIECFDSVEISGVEDRFNASLGTYHDLLKIIKDKDFLDNEENEDILED
IVLTLTLFEDREMIEERLKTYAHLFDDKVMKQLKRRRYTGWGRLSRKLINGIRDKQSGKTIL
DFLKSDGFANRNFMQLIHDDSLTFKEDIQKAQVSGQGDSLHEHIANLAGSPAIKKGILQTVK
VVDELVKVMGRHKPENIVIEMARENQTTQKGQKNSRERMKRIEEGIKELGSQILKEHPVENT
QLQNEKLYLYYLQNGRDMYVDQELDINRLSDYDVDHIVPQSFLKDDSIDNKVLTRSDKNRGK
SDNVPSEEVVKKMKNYWRQLLNAKLITQRKFDNLTKAERGGLSELDKAGFIKRQLVETRQIT
KHVAQILDSRMNTKYDENDKLIREVKVITLKSKLVSDFRKDFQFYKVREINNYHHAHDAYLN
AVVGTALIKKYPKLESEFVYGDYKVYDVRKMIAKSEQEGADKRTADGSEFESPKKKRKV*

In the above sequence, the plain text denotes an adenosine deaminase sequence, bold sequence indicates sequence derived from Cas9, the italics sequence denotes a linker sequence, and the underlined sequence denotes a bipartite nuclear localization sequence.

[0693] In some embodiments, the base editor is ABE8.14, which comprises or consists essentially of the following sequence or a fragment thereof having adenosine deaminase activity:

pNMG-357_ABE8.14 with NGC PAM CP5

MSEVEFSHEYWMRHALTLAKRAWDEREVPVGAVLVHNNRVIGEGWNRPIGRHDPTAHAEIMA
LRQGGLVMONYRLIDATLYVTLEPCVMCAGAMIHSRIGRVVFGARDAKTGAAGSLMDVLHHP
GMNHRVEITEGILADECAALLSDFFRMRRQEIKAQKKAQSSTDGGSSGGSSGSETPGTSESA
TPESSGGSSGGSMSEVEFSHEYWMRHALTLAKRARDEREVPVGAVLVLNNRVIGEGWNRAIG
LHDPTAHAEIMALRQGGLVMQNYRLIDATLYVTFEPCVMCAGAMIHSRIGRVVFGVRNAKTG
AAGSLMDVLHYPGMNHRVEITEGILADECAALLCTFFRMPRQVFNAQKKAQSSTDSGGSSGG
SSGSETPGTSESATPESSGGSSGGSEIGKATAKYFFYSNIMNFFKTEITLANGEIRKRPLIE
TNGETGEIVWDKGRDFATVRKVLSMPQVNIVKKTEVQTGGFSKESILPKRNSDKLIARKKDW
DPKKYGGFMQPTVAYSVLVVAKVEKGKSKKLKSVKELLGITIMERSSFEKNPIDFLEAKGYK
EVKKDLIIKLPKYSLFELENGRKRMLASAKFLQKGNELALPSKYVNFLYLASHYEKLKGSPE
DNEQKQLFVEQHKHYLDEIIEQISEFSKRVILADANLDKVLSAYNKHRDKPIREQAENIIHL
FTLTNLGAPRAFKYFDTTIARKEYRSTKEVLDATLIHQSITGLYETRIDLSQLGGDGGSGGS
GGSGGSGGSGGSGGMDKKYSIGLAIGTNSVGWAVITDEYKVPSKKFKVLGNTDRHSIKKNLI
GALLFDSGETAEATRLKRTARRRYTRRKNRICYLQEIFSNEMAKVDDSFFHRLEESFLVEED
KKHERHPIFGNIVDEVAYHEKYPTIYHLRKKLVDSTDKADLRLIYLALAHMIKFRGHFLIEG
DLNPDNSDVDKLFIQLVQTYNQLFEENPINASGVDAKAILSARLSKSRRLENLIAQLPGEKK
NGLFGNLIALSLGLTPNFKSNFDLAEDAKLQLSKDTYDDDLDNLLAQIGDQYADLFLAAKNL
SDAILLSDILRVNTEITKAPLSASMIKRYDEHHQDLTLLKALVRQQLPEKYKEIFFDQSKNG
YAGYIDGGASQEEFYKFIKPILEKMDGTEELLVKLNREDLLRKQRTFDNGSIPHQIHLGELH
AILRRQEDFYPFLKDNREKIEKILTFRIPYYVGPLARGNSRFAWMTRKSEETITPWNFEEVV
DKGASAQSFIERMTNFDKNLPNEKVLPKHSLLYEYFTVYNELTKVKYVTEGMRKPAFLSGEQ
KKAIVDLLFKTNRKVTVKQLKEDYFKKIECFDSVEISGVEDRFNASLGTYHDLLKIIKDKDE
LDNEENEDILEDIVLTLTLFEDREMIEERLKTYAHLFDDKVMKQLKRRRYTGWGRLSRKLIN
GIRDKQSGKTILDFLKSDGFANRNFMQLIHDDSLTFKEDIQKAQVSGQGDSLHEHIANLAGS
PAIKKGILQTVKVVDELVKVMGRHKPENIVIEMARENQTTQKGQKNSRERMKRIEEGIKELG
SQILKEHPVENTQLQNEKLYLYYLQNGRDMYVDQELDINRLSDYDVDHIVPQSFLKDDSIDN
KVLTRSDKNRGKSDNVPSEEVVKKMKNYWRQLLNAKLITQRKFDNLTKAERGGLSELDKAGE
IKRQLVETRQITKHVAQILDSRMNTKYDENDKLIREVKVITLKSKLVSDFRKDFQFYKVREI
NNYHHAHDAYLNAVVGTALIKKYPKLESEFVYGDYKVYDVRKMIAKSEQEGADKRTADGSEF
ESPKKKRKV*

In the above sequence, the plain text denotes an adenosine deaminase sequence, bold sequence indicates sequence derived from Cas9, the italics sequence denotes a linker sequence, and the underlined sequence denotes a bipartite nuclear localization sequence.

[0694] In some embodiments, the base editor is ABE8.8-m, which comprises or consists essentially of the following sequence or a fragment thereof having adenosine deaminase activity:

### ABE8.8-m

MSEVEFSHEYWMRHALTLAKRARDEREVPVGAVLVLNNRVIGEGWNRAIGLHDPTAHAEIMA
LRQGGLVMONYRLIDATLYVTFEPCVMCAGAMIHSRIGRVVFGVRNAKTGAAGSLMDVLHHP
GMNHRVEITEGILADECAALLCRFFRMPRRVFNAQKKAQSSTDSGGSSGGSSGSETPGTSES
ATPESSGGSSGGSDKKYSIGL [symbol] IGTNSVGWAVITDEYKVPSKKFKVLGNTDRHSIKKNLIGA
LLFDSGETAEATRLKRTARRRYTRRKNRICYLQEIFSNEMAKVDDSFFHRLEESFLVEEDKK
HERHPIFGNIVDEVAYHEKYPTIYHLRKKLVDSTDKADLRLIYLALAHMIKFRGHFLIEGDL
NPDNSDVDKLFIQLVQTYNQLFEENPINASGVDAKAILSARLSKSRRLENLIAQLPGEKKNG
LFGNLIALSLGLTPNFKSNFDLAEDAKLQLSKDTYDDDLDNLLAQIGDQYADLFLAAKNLSD
AILLSDILRVNTEITKAPLSASMIKRYDEHHQDLTLLKALVRQQLPEKYKEIFFDQSKNGYA
GYIDGGASQEEFYKFIKPILEKMDGTEELLVKLNREDLLRKQRTFDNGSIPHQIHLGELHAI
LRRQEDFYPFLKDNREKIEKILTFRIPYYVGPLARGNSRFAWMTRKSEETITPWNFEEVVDK
GASAQSFIERMTNFDKNLPNEKVLPKHSLLYEYFTVYNELTKVKYVTEGMRKPAFLSGEQKK
AIVDLLFKTNRKVTVKQLKEDYFKKIECFDSVEISGVEDRFNASLGTYHDLLKIIKDKDFLD
NEENEDILEDIVLTLTLFEDREMIEERLKTYAHLFDDKVMKQLKRRRYTGWGRLSRKLINGI
RDKQSGKTILDFLKSDGFANRNFMQLIHDDSLTFKEDIQKAQVSGQGDSLHEHIANLAGSPA
IKKGILQTVKVVDELVKVMGRHKPENIVIEMARENQTTQKGQKNSRERMKRIEEGIKELGSQ
ILKEHPVENTQLQNEKLYLYYLQNGRDMYVDQELDINRLSDYDVDHIVPQSFLKDDSIDNKV
LTRSDKNRGKSDNVPSEEVVKKMKNYWRQLLNAKLITQRKFDNLTKAERGGLSELDKAGFIK
RQLVETRQITKHVAQILDSRMNTKYDENDKLIREVKVITLKSKLVSDFRKDFQFYKVREINN
YHHAHDAYLNAVVGTALIKKYPKLESEFVYGDYKVYDVRKMIAKSEQEIGKATAKYFFYSNI
MNFFKTEITLANGEIRKRPLIETNGETGEIVWDKGRDFATVRKVLSMPQVNIVKKTEVQTGG
FSKESILPKRNSDKLIARKKDWDPKKYGGFDSPTVAYSVLVVAKVEKGKSKKLKSVKELLGI
TIMERSSFEKNPIDFLEAKGYKEVKKDLIIKLPKYSLFELENGRKRMLASAGELQKGNELAL
PSKYVNFLYLASHYEKLKGSPEDNEQKQLFVEQHKHYLDEIIEQISEFSKRVILADANLDKV
LSAYNKHRDKPIREQAENIIHLFTLTNLGAPAAFKYFDTTIDRKRYTSTKEVLDATLIHQSI
TGLYETRIDLSQLGGDEGADKRTADGSEFESPKKKRKV*

[0696] In the above sequence, the plain text denotes an adenosine deaminase sequence, bold sequence indicates sequence derived from Cas9, the italicized sequence denotes a linker sequence, underlined sequence denotes a bipartite nuclear localization sequence, and double underlined sequence indicates mutations.

[0697] In some embodiments, the base editor is ABE8.8-d, which comprises or consists essentially of the following sequence or a fragment thereof having adenosine deaminase activity:

### ABE8.8-d

MSEVEFSHEYWMRHALTLAKRAWDEREVPVGAVLVHNNRVIGEGWNRPIGRHDPTAHAEIMA
LRQGGLVMONYRLIDATLYVTLEPCVMCAGAMIHSRIGRVVFGARDAKTGAAGSLMDVLHHP
GMNHRVEITEGILADECAALLSDFFRMRRQEIKAQKKAQSSTDSGGSSGGSSGSETPGTSES
ATPESSGGSSGGSSEVEFSHEYWMRHALTLAKRARDEREVPVGAVLVLNNRVIGEGWNRAIG
LHDPTAHAEIMALRQGGLVMQNYRLIDATLYVTFEPCVMCAGAMIHSRIGRVVFGVRNAKTG
AAGSLMDVLHHPGMNHRVEITEGILADECAALLCRFFRMPRRVFNAQKKAQSSTDSGGSSGG
SSGSETPGTSESATPESSGGSSGGSDKKYSIGL [symbol] IGTNSVGWAVITDEYKVPSKKFKVLGNT
DRHSIKKNLIGALLFDSGETAEATRLKRTARRRYTRRKNRICYLQEIFSNEMAKVDDSFFHR
LEESFLVEEDKKHERHPIFGNIVDEVAYHEKYPTIYHLRKKLVDSTDKADLRLIYLALAHMI
KFRGHFLIEGDLNPDNSDVDKLFIQLVQTYNQLFEENPINASGVDAKAILSARLSKSRRLEN
LIAQLPGEKKNGLFGNLIALSLGLTPNFKSNFDLAEDAKLQLSKDTYDDDLDNLLAQIGDQY
ADLFLAAKNLSDAILLSDILRVNTEITKAPLSASMIKRYDEHHQDLTLLKALVRQQLPEKYK
EIFFDQSKNGYAGYIDGGASQEEFYKFIKPILEKMDGTEELLVKLNREDLLRKQRTFDNGSI
PHQIHLGELHAILRRQEDFYPFLKDNREKIEKILTFRIPYYVGPLARGNSRFAWMTRKSEET
ITPWNFEEVVDKGASAQSFIERMTNFDKNLPNEKVLPKHSLLYEYFTVYNELTKVKYVTEGM
RKPAFLSGEQKKAIVDLLFKTNRKVTVKQLKEDYFKKIECFDSVEISGVEDRFNASLGTYHD
LLKIIKDKDFLDNEENEDILEDIVLTLTLFEDREMIEERLKTYAHLFDDKVMKQLKRRRYTG
WGRLSRKLINGIRDKQSGKTILDFLKSDGFANRNFMQLIHDDSLTFKEDIQKAQVSGQGDSL
HEHIANLAGSPAIKKGILQTVKVVDELVKVMGRHKPENIVIEMARENQTTQKGQKNSRERMK
RIEEGIKELGSQILKEHPVENTQLQNEKLYLYYLQNGRDMYVDQELDINRLSDYDVDHIVPQ
SFLKDDSIDNKVLTRSDKNRGKSDNVPSEEVVKKMKNYWRQLLNAKLITQRKFDNLTKAERG
GLSELDKAGFIKRQLVETRQITKHVAQILDSRMNTKYDENDKLIREVKVITLKSKLVSDFRK
DFQFYKVREINNYHHAHDAYLNAVVGTALIKKYPKLESEFVYGDYKVYDVRKMIAKSEQEIG
KATAKYFFYSNIMNFFKTEITLANGEIRKRPLIETNGETGEIVWDKGRDFATVRKVLSMPQV
NIVKKTEVQTGGFSKESILPKRNSDKLIARKKDWDPKKYGGFDSPTVAYSVLVVAKVEKGKS
KKLKSVKELLGITIMERSSFEKNPIDFLEAKGYKEVKKDLIIKLPKYSLFELENGRKRMLAS
AGELQKGNELALPSKYVNFLYLASHYEKLKGSPEDNEQKQLFVEQHKHYLDEIIEQISEFSK
RVILADANLDKVLSAYNKHRDKPIREQAENIIHLFTLTNLGAPAAFKYFDTTIDRKRYTSTK
EVLDATLIHQSITGLYETRIDLSQLGGDEGADKRTADGSEFESPKKKRKV*

[0699] In the above sequence, the plain text denotes an adenosine deaminase sequence, bold sequence indicates sequence derived from Cas9, the italicized sequence denotes a linker sequence, underlined sequence denotes a bipartite nuclear localization sequence, and double underlined sequence indicates mutations.

[0700] In some embodiments, the base editor is ABE8.13-m, which comprises or consists essentially of the following sequence or a fragment thereof having adenosine deaminase activity:

### ABE8.13-m

MSEVEFSHEYWMRHALTLAKRARDEREVPVGAVLVLNNRVIGEGWNRAIGLHDPTAHAEIMA
LRQGGLVMQNYRLYDATLYVTFEPCVMCAGAMIHSRIGRVVFGVRNAKTGAAGSLMDVLHHP
GMNHRVEITEGILADECAALLCRFFRMPRRVFNAQKKAQSSTDSGGSSGGSSGSETPGTSES
ATPESSGGSSGGSDKKYSIGL [symbol] IGTNSVGWAVITDEYKVPSKKFKVLGNTDRHSIKKNLIGA
LLFDSGETAEATRLKRTARRRYTRRKNRICYLQEIFSNEMAKVDDSFFHRLEESFLVEEDKK
HERHPIFGNIVDEVAYHEKYPTIYHLRKKLVDSTDKADLRLIYLALAHMIKFRGHFLIEGDL
NPDNSDVDKLFIQLVQTYNQLFEENPINASGVDAKAILSARLSKSRRLENLIAQLPGEKKNG
LFGNLIALSLGLTPNFKSNFDLAEDAKLQLSKDTYDDDLDNLLAQIGDQYADLFLAAKNLSD
AILLSDILRVNTEITKAPLSASMIKRYDEHHQDLTLLKALVRQQLPEKYKEIFFDQSKNGYA
GYIDGGASQEEFYKFIKPILEKMDGTEELLVKLNREDLLRKQRTFDNGSIPHQIHLGELHAI
LRRQEDFYPFLKDNREKIEKILTFRIPYYVGPLARGNSRFAWMTRKSEETITPWNFEEVVDK
GASAQSFIERMTNFDKNLPNEKVLPKHSLLYEYFTVYNELTKVKYVTEGMRKPAFLSGEQKK
AIVDLLFKTNRKVTVKQLKEDYFKKIECFDSVEISGVEDRFNASLGTYHDLLKIIKDKDFLD
NEENEDILEDIVLTLTLFEDREMIEERLKTYAHLFDDKVMKQLKRRRYTGWGRLSRKLINGI
RDKQSGKTILDFLKSDGFANRNFMQLIHDDSLTFKEDIQKAQVSGQGDSLHEHIANLAGSPA
IKKGILQTVKVVDELVKVMGRHKPENIVIEMARENQTTQKGQKNSRERMKRIEEGIKELGSQ
ILKEHPVENTQLQNEKLYLYYLQNGRDMYVDQELDINRLSDYDVDHIVPQSFLKDDSIDNKV
LTRSDKNRGKSDNVPSEEVVKKMKNYWRQLLNAKLITQRKFDNLTKAERGGLSELDKAGFIK
RQLVETRQITKHVAQILDSRMNTKYDENDKLIREVKVITLKSKLVSDFRKDFQFYKVREINN
YHHAHDAYLNAVVGTALIKKYPKLESEFVYGDYKVYDVRKMIAKSEQEIGKATAKYFFYSNI
MNFFKTEITLANGEIRKRPLIETNGETGEIVWDKGRDFATVRKVLSMPQVNIVKKTEVQTGG
FSKESILPKRNSDKLIARKKDWDPKKYGGFDSPTVAYSVLVVAKVEKGKSKKLKSVKELLGI
TIMERSSFEKNPIDFLEAKGYKEVKKDLIIKLPKYSLFELENGRKRMLASAGELQKGNELAL
PSKYVNFLYLASHYEKLKGSPEDNEQKQLFVEQHKHYLDEIIEQISEFSKRVILADANLDKV
LSAYNKHRDKPIREQAENIIHLFTLTNLGAPAAFKYFDTTIDRKRYTSTKEVLDATLIHQSI
TGLYETRIDLSQLGGDEGADKRTADGSEFESPKKKRKV*

[0702] In the above sequence, the plain text denotes an adenosine deaminase sequence, bold sequence indicates sequence derived from Cas9, the italicized sequence denotes a linker sequence, underlined sequence denotes a bipartite nuclear localization sequence, and double underlined sequence indicates mutations.

[0703] In some embodiments, the base editor is ABE8.13-d, which comprises or consists essentially of the following sequence or a fragment thereof having adenosine deaminase activity:

### ABE8.13-d

MSEVEFSHEYWMRHALTLAKRAWDEREVPVGAVLVHNNRVIGEGWNRPIGRHDPTAHAEIMA
LRQGGLVMONYRLIDATLYVTLEPCVMCAGAMIHSRIGRVVFGARDAKTGAAGSLMDVLHHP
GMNHRVEITEGILADECAALLSDFFRMRRQEIKAQKKAQSSTDSGGSSGGSSGSETPGTSES
ATPESSGGSSGGSSEVEFSHEYWMRHALTLAKRARDEREVPVGAVLVLNNRVIGEGWNRAIG
LHDPTAHAEIMALRQGGLVMQNYRLYDATLYVTFEPCVMCAGAMIHSRIGRVVFGVRNAKTG
AAGSLMDVLHHPGMNHRVEITEGILADECAALLCRFFRMPRRVFNAQKKAQSSTDSGGSSGG
SSGSETPGTSESATPESSGGSSGGSDKKYSIGL [symbol] IGTNSVGWAVITDEYKVPSKKFKVLGNT
DRHSIKKNLIGALLFDSGETAEATRLKRTARRRYTRRKNRICYLQEIFSNEMAKVDDSFFHR
LEESFLVEEDKKHERHPIFGNIVDEVAYHEKYPTIYHLRKKLVDSTDKADLRLIYLALAHMI
KFRGHFLIEGDLNPDNSDVDKLFIQLVQTYNQLFEENPINASGVDAKAILSARLSKSRRLEN
LIAQLPGEKKNGLFGNLIALSLGLTPNFKSNFDLAEDAKLQLSKDTYDDDLDNLLAQIGDQY
ADLFLAAKNLSDAILLSDILRVNTEITKAPLSASMIKRYDEHHQDLTLLKALVRQQLPEKYK
EIFFDQSKNGYAGYIDGGASQEEFYKFIKPILEKMDGTEELLVKLNREDLLRKQRTFDNGSI
PHQIHLGELHAILRRQEDFYPFLKDNREKIEKILTFRIPYYVGPLARGNSRFAWMTRKSEET
ITPWNFEEVVDKGASAQSFIERMTNFDKNLPNEKVLPKHSLLYEYFTVYNELTKVKYVTEGM
RKPAFLSGEQKKAIVDLLFKTNRKVTVKQLKEDYFKKIECFDSVEISGVEDRFNASLGTYHD
LLKIIKDKDFLDNEENEDILEDIVLTLTLFEDREMIEERLKTYAHLFDDKVMKQLKRRRYTG
WGRLSRKLINGIRDKQSGKTILDFLKSDGFANRNFMQLIHDDSLTFKEDIQKAQVSGQGDSL
HEHIANLAGSPAIKKGILQTVKVVDELVKVMGRHKPENIVIEMARENQTTQKGQKNSRERMK
RIEEGIKELGSQILKEHPVENTQLQNEKLYLYYLQNGRDMYVDQELDINRLSDYDVDHIVPQ
SFLKDDSIDNKVLTRSDKNRGKSDNVPSEEVVKKMKNYWRQLLNAKLITQRKFDNLTKAERG
GLSELDKAGFIKRQLVETRQITKHVAQILDSRMNTKYDENDKLIREVKVITLKSKLVSDFRK
DFQFYKVREINNYHHAHDAYLNAVVGTALIKKYPKLESEFVYGDYKVYDVRKMIAKSEQEIG
KATAKYFFYSNIMNFFKTEITLANGEIRKRPLIETNGETGEIVWDKGRDFATVRKVLSMPQV
NIVKKTEVQTGGFSKESILPKRNSDKLIARKKDWDPKKYGGFDSPTVAYSVLVVAKVEKGKS
KKLKSVKELLGITIMERSSFEKNPIDFLEAKGYKEVKKDLIIKLPKYSLFELENGRKRMLAS
AGELQKGNELALPSKYVNFLYLASHYEKLKGSPEDNEQKQLFVEQHKHYLDEIIEQISEFSK
RVILADANLDKVLSAYNKHRDKPIREQAENIIHLFTLTNLGAPAAFKYFDTTIDRKRYTSTK
EVLDATLIHQSITGLYETRIDLSQLGGDEGADKRTADGSEFESPKKKRKV*

[0705] In the above sequence, the plain text denotes an adenosine deaminase sequence, bold sequence indicates sequence derived from Cas9, the italicized sequence denotes a linker sequence, underlined sequence denotes a bipartite nuclear localization sequence, and double underlined sequence indicates mutations.

[0706] In some embodiments, the base editor is ABE8.17-m, which comprises or consists essentially of the following sequence or a fragment thereof having adenosine deaminase activity:

### ABE8.17-m

MSEVEFSHEYWMRHALTLAKRARDEREVPVGAVLVLNNRVIGEGWNRAIGLHDPTAHAEIMA
LRQGGLVMONYRLIDATLYSTFEPCVMCAGAMIHSRIGRVVFGVRNAKTGAAGSLMDVLHYP
GMNHRVEITEGILADECAALLCYFFRMPRRVFNAQKKAQSSTDSGGSSGGSSGSETPGTSES
ATPESSGGSSGGSDKKYSIGL [symbol] IGTNSVGWAVITDEYKVPSKKFKVLGNTDRHSIKKNLIGA
LLFDSGETAEATRLKRTARRRYTRRKNRICYLQEIFSNEMAKVDDSFFHRLEESFLVEEDKK
HERHPIFGNIVDEVAYHEKYPTIYHLRKKLVDSTDKADLRLIYLALAHMIKFRGHFLIEGDL
NPDNSDVDKLFIQLVQTYNQLFEENPINASGVDAKAILSARLSKSRRLENLIAQLPGEKKNG
LFGNLIALSLGLTPNFKSNFDLAEDAKLQLSKDTYDDDLDNLLAQIGDQYADLFLAAKNLSD
AILLSDILRVNTEITKAPLSASMIKRYDEHHQDLTLLKALVRQQLPEKYKEIFFDQSKNGYA
GYIDGGASQEEFYKFIKPILEKMDGTEELLVKLNREDLLRKQRTFDNGSIPHQIHLGELHAI
LRRQEDFYPFLKDNREKIEKILTFRIPYYVGPLARGNSRFAWMTRKSEETITPWNFEEVVDK
GASAQSFIERMTNFDKNLPNEKVLPKHSLLYEYFTVYNELTKVKYVTEGMRKPAFLSGEQKK
AIVDLLFKTNRKVTVKQLKEDYFKKIECFDSVEISGVEDRFNASLGTYHDLLKIIKDKDFLD
NEENEDILEDIVLTLTLFEDREMIEERLKTYAHLFDDKVMKQLKRRRYTGWGRLSRKLINGI
RDKQSGKTILDFLKSDGFANRNFMQLIHDDSLTFKEDIQKAQVSGQGDSLHEHIANLAGSPA
IKKGILQTVKVVDELVKVMGRHKPENIVIEMARENQTTQKGQKNSRERMKRIEEGIKELGSQ
ILKEHPVENTQLQNEKLYLYYLQNGRDMYVDQELDINRLSDYDVDHIVPQSFLKDDSIDNKV
LTRSDKNRGKSDNVPSEEVVKKMKNYWRQLLNAKLITQRKFDNLTKAERGGLSELDKAGFIK
RQLVETRQITKHVAQILDSRMNTKYDENDKLIREVKVITLKSKLVSDFRKDFQFYKVREINN
YHHAHDAYLNAVVGTALIKKYPKLESEFVYGDYKVYDVRKMIAKSEQEIGKATAKYFFYSNI
MNFFKTEITLANGEIRKRPLIETNGETGEIVWDKGRDFATVRKVLSMPQVNIVKKTEVQTGG
FSKESILPKRNSDKLIARKKDWDPKKYGGFDSPTVAYSVLVVAKVEKGKSKKLKSVKELLGI
TIMERSSFEKNPIDFLEAKGYKEVKKDLIIKLPKYSLFELENGRKRMLASAGELQKGNELAL
PSKYVNFLYLASHYEKLKGSPEDNEQKQLFVEQHKHYLDEIIEQISEFSKRVILADANLDKV
LSAYNKHRDKPIREQAENIIHLFTLTNLGAPAAFKYFDTTIDRKRYTSTKEVLDATLIHQSI
TGLYETRIDLSQLGGDEGADKRTADGSEFESPKKKRKV*

[0708] In the above sequence, the plain text denotes an adenosine deaminase sequence, bold sequence indicates sequence derived from Cas9, the italicized sequence denotes a linker sequence, underlined sequence denotes a bipartite nuclear localization sequence, and double underlined sequence indicates mutations.

[0709] In some embodiments, the base editor is ABE8.17-d, which comprises or consists essentially of the following sequence or a fragment thereof having adenosine deaminase activity:

### ABE8.17-d

MSEVEFSHEYWMRHALTLAKRAWDEREVPVGAVLVHNNRVIGEGWNRPIGRHDPTAHAEIMA
LRQGGLVMONYRLIDATLYVTLEPCVMCAGAMIHSRIGRVVFGARDAKTGAAGSLMDVLHHP
GMNHRVEITEGILADECAALLSDFFRMRRQEIKAQKKAQSSTDSGGSSGGSSGSETPGTSES
ATPESSGGSSGGSSEVEFSHEYWMRHALTLAKRARDEREVPVGAVLVLNNRVIGEGWNRAIG
LHDPTAHAEIMALRQGGLVMQNYRLIDATLYSTFEPCVMCAGAMIHSRIGRVVFGVRNAKTG
AAGSLMDVLHYPGMNHRVEITEGILADECAALLCYFFRMPRRVFNAQKKAQSSTDSGGSSGG
SSGSETPGTSESATPESSGGSSGGSDKKYSIGL [symbol] IGTNSVGWAVITDEYKVPSKKFKVLGNT
DRHSIKKNLIGALLFDSGETAEATRLKRTARRRYTRRKNRICYLQEIFSNEMAKVDDSFFHR
LEESFLVEEDKKHERHPIFGNIVDEVAYHEKYPTIYHLRKKLVDSTDKADLRLIYLALAHMI
KFRGHFLIEGDLNPDNSDVDKLFIQLVQTYNQLFEENPINASGVDAKAILSARLSKSRRLEN
LIAQLPGEKKNGLFGNLIALSLGLTPNFKSNFDLAEDAKLQLSKDTYDDDLDNLLAQIGDQY
ADLFLAAKNLSDAILLSDILRVNTEITKAPLSASMIKRYDEHHQDLTLLKALVRQQLPEKYK
EIFFDQSKNGYAGYIDGGASQEEFYKFIKPILEKMDGTEELLVKLNREDLLRKQRTFDNGSI
PHQIHLGELHAILRRQEDFYPFLKDNREKIEKILTFRIPYYVGPLARGNSRFAWMTRKSEET
ITPWNFEEVVDKGASAQSFIERMTNFDKNLPNEKVLPKHSLLYEYFTVYNELTKVKYVTEGM
RKPAFLSGEQKKAIVDLLFKTNRKVTVKQLKEDYFKKIECFDSVEISGVEDRFNASLGTYHD
LLKIIKDKDFLDNEENEDILEDIVLTLTLFEDREMIEERLKTYAHLFDDKVMKQLKRRRYTG
WGRLSRKLINGIRDKQSGKTILDFLKSDGFANRNFMQLIHDDSLTFKEDIQKAQVSGQGDSL
HEHIANLAGSPAIKKGILQTVKVVDELVKVMGRHKPENIVIEMARENQTTQKGQKNSRERMK
RIEEGIKELGSQILKEHPVENTQLQNEKLYLYYLQNGRDMYVDQELDINRLSDYDVDHIVPQ
SFLKDDSIDNKVLTRSDKNRGKSDNVPSEEVVKKMKNYWRQLLNAKLITQRKFDNLTKAERG
GLSELDKAGFIKRQLVETRQITKHVAQILDSRMNTKYDENDKLIREVKVITLKSKLVSDFRK
DFQFYKVREINNYHHAHDAYLNAVVGTALIKKYPKLESEFVYGDYKVYDVRKMIAKSEQEIG
KATAKYFFYSNIMNFFKTEITLANGEIRKRPLIETNGETGEIVWDKGRDFATVRKVLSMPQV
NIVKKTEVQTGGFSKESILPKRNSDKLIARKKDWDPKKYGGFDSPTVAYSVLVVAKVEKGKS
KKLKSVKELLGITIMERSSFEKNPIDFLEAKGYKEVKKDLIIKLPKYSLFELENGRKRMLAS
AGELQKGNELALPSKYVNFLYLASHYEKLKGSPEDNEQKQLFVEQHKHYLDEIIEQISEFSK
RVILADANLDKVLSAYNKHRDKPIREQAENIIHLFTLTNLGAPAAFKYFDTTIDRKRYTSTK
EVLDATLIHQSITGLYETRIDLSQLGGDEGADKRTADGSEFESPKKKRKV*

[0711] In the above sequence, the plain text denotes an adenosine deaminase sequence, bold sequence indicates sequence derived from Cas9, the italicized sequence denotes a linker sequence, underlined sequence denotes a bipartite nuclear localization sequence, and double underlined sequence indicates mutations.

[0712] In some embodiments, the base editor is ABE8.20-m, which comprises or consists essentially of the following sequence or a fragment thereof having adenosine deaminase activity:

### ABE8.20-m

MSEVEFSHEYWMRHALTLAKRARDEREVPVGAVLVLNNRVIGEGWNRAIGLHDPTAHAEIMA
LRQGGLVMONYRLYDATLYSTFEPCVMCAGAMIHSRIGRVVFGVRNAKTGAAGSLMDVLHHP
GMNHRVEITEGILADECAALLCRFFRMPRRVFNAQKKAQSSTDSGGSSGGSSGSETPGTSES
ATPESSGGSSGGSDKKYSIGL [symbol] IGTNSVGWAVITDEYKVPSKKFKVLGNTDRHSIKKNLIGA
LLFDSGETAEATRLKRTARRRYTRRKNRICYLQEIFSNEMAKVDDSFFHRLEESFLVEEDKK
HERHPIFGNIVDEVAYHEKYPTIYHLRKKLVDSTDKADLRLIYLALAHMIKFRGHFLIEGDL
NPDNSDVDKLFIQLVQTYNQLFEENPINASGVDAKAILSARLSKSRRLENLIAQLPGEKKNG
LFGNLIALSLGLTPNFKSNFDLAEDAKLQLSKDTYDDDLDNLLAQIGDQYADLFLAAKNLSD
AILLSDILRVNTEITKAPLSASMIKRYDEHHQDLTLLKALVRQQLPEKYKEIFFDQSKNGYA
GYIDGGASQEEFYKFIKPILEKMDGTEELLVKLNREDLLRKQRTFDNGSIPHQIHLGELHAI
LRRQEDFYPFLKDNREKIEKILTFRIPYYVGPLARGNSRFAWMTRKSEETITPWNFEEVVDK
GASAQSFIERMTNFDKNLPNEKVLPKHSLLYEYFTVYNELTKVKYVTEGMRKPAFLSGEQKK
AIVDLLFKTNRKVTVKQLKEDYFKKIECFDSVEISGVEDRFNASLGTYHDLLKIIKDKDFLD
NEENEDILEDIVLTLTLFEDREMIEERLKTYAHLFDDKVMKQLKRRRYTGWGRLSRKLINGI
RDKQSGKTILDFLKSDGFANRNFMQLIHDDSLTFKEDIQKAQVSGQGDSLHEHIANLAGSPA
IKKGILQTVKVVDELVKVMGRHKPENIVIEMARENQTTQKGQKNSRERMKRIEEGIKELGSQ
ILKEHPVENTQLQNEKLYLYYLQNGRDMYVDQELDINRLSDYDVDHIVPQSFLKDDSIDNKV
LTRSDKNRGKSDNVPSEEVVKKMKNYWRQLLNAKLITQRKFDNLTKAERGGLSELDKAGFIK
RQLVETRQITKHVAQILDSRMNTKYDENDKLIREVKVITLKSKLVSDFRKDFQFYKVREINN
YHHAHDAYLNAVVGTALIKKYPKLESEFVYGDYKVYDVRKMIAKSEQEIGKATAKYFFYSNI
MNFFKTEITLANGEIRKRPLIETNGETGEIVWDKGRDFATVRKVLSMPQVNIVKKTEVQTGG
FSKESILPKRNSDKLIARKKDWDPKKYGGFDSPTVAYSVLVVAKVEKGKSKKLKSVKELLGI
TIMERSSFEKNPIDFLEAKGYKEVKKDLIIKLPKYSLFELENGRKRMLASAGELQKGNELAL
PSKYVNFLYLASHYEKLKGSPEDNEQKQLFVEQHKHYLDEIIEQISEFSKRVILADANLDKV
LSAYNKHRDKPIREQAENIIHLFTLTNLGAPAAFKYFDTTIDRKRYTSTKEVLDATLIHQSI
TGLYETRIDLSQLGGDEGADKRTADGSEFESPKKKRKV*

[0714] In the above sequence, the plain text denotes an adenosine deaminase sequence, bold sequence indicates sequence derived from Cas9, the italicized sequence denotes a linker sequence, underlined sequence denotes a bipartite nuclear localization sequence, and double underlined sequence indicates mutations.

[0715] In some embodiments, the base editor is ABE8.20-d, which comprises or consists essentially of the following sequence or a fragment thereof having adenosine deaminase activity:

### ABE8.20-d

MSEVEFSHEYWMRHALTLAKRAWDEREVPVGAVLVHNNRVIGEGWNRPIGRHDPTAHAEIMA
LRQGGLVMONYRLIDATLYVTLEPCVMCAGAMIHSRIGRVVFGARDAKTGAAGSLMDVLHHP
GMNHRVEITEGILADECAALLSDFFRMRRQEIKAQKKAQSSTDSGGSSGGSSGSETPGTSES
ATPESSGGSSGGSSEVEFSHEYWMRHALTLAKRARDEREVPVGAVLVLNNRVIGEGWNRAIG
LHDPTAHAEIMALRQGGLVMQNYRLYDATLYSTFEPCVMCAGAMIHSRIGRVVFGVRNAKTG
AAGSLMDVLHHPGMNHRVEITEGILADECAALLCRFFRMPRRVFNAQKKAQSSTDSGGSSGG
SSGSETPGTSESATPESSGGSSGGSDKKYSIGL [symbol] IGTNSVGWAVITDEYKVPSKKFKVLGNT
DRHSIKKNLIGALLFDSGETAEATRLKRTARRRYTRRKNRICYLQEIFSNEMAKVDDSFFHR
LEESFLVEEDKKHERHPIFGNIVDEVAYHEKYPTIYHLRKKLVDSTDKADLRLIYLALAHMI
KFRGHFLIEGDLNPDNSDVDKLFIQLVQTYNQLFEENPINASGVDAKAILSARLSKSRRLEN
LIAQLPGEKKNGLFGNLIALSLGLTPNFKSNFDLAEDAKLQLSKDTYDDDLDNLLAQIGDQY
ADLFLAAKNLSDAILLSDILRVNTEITKAPLSASMIKRYDEHHQDLTLLKALVRQQLPEKYK
EIFFDQSKNGYAGYIDGGASQEEFYKFIKPILEKMDGTEELLVKLNREDLLRKQRTFDNGSI
PHQIHLGELHAILRRQEDFYPFLKDNREKIEKILTFRIPYYVGPLARGNSRFAWMTRKSEET
ITPWNFEEVVDKGASAQSFIERMTNFDKNLPNEKVLPKHSLLYEYFTVYNELTKVKYVTEGM
RKPAFLSGEQKKAIVDLLFKTNRKVTVKQLKEDYFKKIECFDSVEISGVEDRFNASLGTYHD
LLKIIKDKDFLDNEENEDILEDIVLTLTLFEDREMIEERLKTYAHLFDDKVMKQLKRRRYTG
WGRLSRKLINGIRDKQSGKTILDFLKSDGFANRNFMQLIHDDSLTFKEDIQKAQVSGQGDSL
HEHIANLAGSPAIKKGILQTVKVVDELVKVMGRHKPENIVIEMARENQTTQKGQKNSRERMK
RIEEGIKELGSQILKEHPVENTQLQNEKLYLYYLQNGRDMYVDQELDINRLSDYDVDHIVPQ
SFLKDDSIDNKVLTRSDKNRGKSDNVPSEEVVKKMKNYWRQLLNAKLITQRKFDNLTKAERG
GLSELDKAGFIKRQLVETRQITKHVAQILDSRMNTKYDENDKLIREVKVITLKSKLVSDFRK
DFQFYKVREINNYHHAHDAYLNAVVGTALIKKYPKLESEFVYGDYKVYDVRKMIAKSEQEIG
KATAKYFFYSNIMNFFKTEITLANGEIRKRPLIETNGETGEIVWDKGRDFATVRKVLSMPQV
NIVKKTEVQTGGFSKESILPKRNSDKLIARKKDWDPKKYGGFDSPTVAYSVLVVAKVEKGKS
KKLKSVKELLGITIMERSSFEKNPIDFLEAKGYKEVKKDLIIKLPKYSLFELENGRKRMLAS
AGELQKGNELALPSKYVNFLYLASHYEKLKGSPEDNEQKQLFVEQHKHYLDEIIEQISEFSK
RVILADANLDKVLSAYNKHRDKPIREQAENIIHLFTLTNLGAPAAFKYFDTTIDRKRYTSTK
EVLDATLIHQSITGLYETRIDLSQLGGDEGADKRTADGSEFESPKKKRKV*

[0717] In the above sequence, the plain text denotes an adenosine deaminase sequence, bold sequence indicates sequence derived from Cas9, the italicized sequence denotes a linker sequence, underlined sequence denotes a bipartite nuclear localization sequence, and double underlined sequence indicates mutations.

[0718] In some embodiments, an ABE8 is selected from the following sequences:

01. monoABE8.1_bpNLS + Y147T
MSEVEFSHEYWMRHALTLAKRARDEREVPVGAVLVLNNRVIGEGWNRAIGLHDPTAHAEIMA
LRQGGLVMQNYRLIDATLYVTFEPCVMCAGAMIHSRIGRVVFGVRNAKTGAAGSLMDVLHYP
GMNHRVEITEGILADECAALLCTEFRMPRQVFNAQKKAQSSTDSGGSSGGSSGSETPGTSES
ATPESSGGSSGGSDKKYSIGLAIGTNSVGWAVITDEYKVPSKKFKVLGNTDRHSIKKNLIGA
LLFDSGETAEATRLKRTARRRYTRRKNRICYLQEIFSNEMAKVDDSFFHRLEESFLVEEDKK
HERHPIFGNIVDEVAYHEKYPTIYHLRKKLVDSTDKADLRLIYLALAHMIKFRGHFLIEGDL
NPDNSDVDKLFIQLVQTYNQLFEENPINASGVDAKAILSARLSKSRRLENLIAQLPGEKKNG
LFGNLIALSLGLTPNFKSNFDLAEDAKLQLSKDTYDDDLDNLLAQIGDQYADLFLAAKNLSD
AILLSDILRVNTEITKAPLSASMIKRYDEHHQDLTLLKALVRQQLPEKYKEIFFDQSKNGYA
GYIDGGASQEEFYKFIKPILEKMDGTEELLVKLNREDLLRKQRTFDNGSIPHQIHLGELHAI
LRRQEDFYPFLKDNREKIEKILTFRIPYYVGPLARGNSRFAWMTRKSEETITPWNFEEVVDK
GASAQSFIERMTNFDKNLPNEKVLPKHSLLYEYFTVYNELTKVKYVTEGMRKPAFLSGEQKK
AIVDLLFKTNRKVTVKQLKEDYFKKIECFDSVEISGVEDRFNASLGTYHDLLKIIKDKDFLD
NEENEDILEDIVLTLTLFEDREMIEERLKTYAHLFDDKVMKQLKRRRYTGWGRLSRKLINGI
RDKQSGKTILDFLKSDGFANRNFMQLIHDDSLTFKEDIQKAQVSGQGDSLHEHIANLAGSPA
IKKGILQTVKVVDELVKVMGRHKPENIVIEMARENQTTQKGQKNSRERMKRIEEGIKELGSQ
ILKEHPVENTQLQNEKLYLYYLQNGRDMYVDQELDINRLSDYDVDHIVPQSFLKDDSIDNKV
LTRSDKNRGKSDNVPSEEVVKKMKNYWRQLLNAKLITQRKFDNLTKAERGGLSELDKAGFIK
RQLVETRQITKHVAQILDSRMNTKYDENDKLIREVKVITLKSKLVSDFRKDFQFYKVREINN
YHHAHDAYLNAVVGTALIKKYPKLESEFVYGDYKVYDVRKMIAKSEQEIGKATAKYFFYSNI
MNFFKTEITLANGEIRKRPLIETNGETGEIVWDKGRDFATVRKVLSMPQVNIVKKTEVQTGG
FSKESILPKRNSDKLIARKKDWDPKKYGGFVSPTVAYSVLVVAKVEKGKSKKLKSVKELLGI
TIMERSSFEKNPIDFLEAKGYKEVKKDLIIKLPKYSLFELENGRKRMLASARELQKGNELAL
PSKYVNFLYLASHYEKLKGSPEDNEQKQLFVEQHKHYLDEIIEQISEFSKRVILADANLDKV
LSAYNKHRDKPIREQAENIIHLFTLTNLGAPAAFKYFDTTIDRKQYRSTKEVLDATLIHQSI
TGLYETRIDLSQLGGDEGADKRTADGSEFESPKKKRKV
02. monoABE8.1_bpNLS + Y147R
MSEVEFSHEYWMRHALTLAKRARDEREVPVGAVLVLNNRVIGEGWNRAIGLHDPTAHAEIMA
LRQGGLVMQNYRLIDATLYVTFEPCVMCAGAMIHSRIGRVVFGVRNAKTGAAGSLMDVLHYP
GMNHRVEITEGILADECAALLCRFFRMPRQVFNAQKKAQSSTDSGGSSGGSSGSETPGTSES
ATPESSGGSSGGSDKKYSIGLAIGTNSVGWAVITDEYKVPSKKFKVLGNTDRHSIKKNLIGA
LLFDSGETAEATRLKRTARRRYTRRKNRICYLQEIFSNEMAKVDDSFFHRLEESFLVEEDKK
HERHPIFGNIVDEVAYHEKYPTIYHLRKKLVDSTDKADLRLIYLALAHMIKFRGHFLIEGDL
NPDNSDVDKLFIQLVQTYNQLFEENPINASGVDAKAILSARLSKSRRLENLIAQLPGEKKNG
LFGNLIALSLGLTPNFKSNFDLAEDAKLQLSKDTYDDDLDNLLAQIGDQYADLFLAAKNLSD
AILLSDILRVNTEITKAPLSASMIKRYDEHHQDLTLLKALVRQQLPEKYKEIFFDQSKNGYA
GYIDGGASQEEFYKFIKPILEKMDGTEELLVKLNREDLLRKQRTFDNGSIPHQIHLGELHAI
LRRQEDFYPFLKDNREKIEKILTFRIPYYVGPLARGNSRFAWMTRKSEETITPWNFEEVVDK
GASAQSFIERMTNFDKNLPNEKVLPKHSLLYEYFTVYNELTKVKYVTEGMRKPAFLSGEQKK
AIVDLLFKTNRKVTVKQLKEDYFKKIECFDSVEISGVEDRFNASLGTYHDLLKIIKDKDFLD
NEENEDILEDIVLTLTLFEDREMIEERLKTYAHLFDDKVMKQLKRRRYTGWGRLSRKLINGI
RDKQSGKTILDFLKSDGFANRNFMQLIHDDSLTFKEDIQKAQVSGQGDSLHEHIANLAGSPA
IKKGILQTVKVVDELVKVMGRHKPENIVIEMARENQTTQKGQKNSRERMKRIEEGIKELGSQ
ILKEHPVENTQLQNEKLYLYYLQNGRDMYVDQELDINRLSDYDVDHIVPQSFLKDDSIDNKV
LTRSDKNRGKSDNVPSEEVVKKMKNYWRQLLNAKLITQRKFDNLTKAERGGLSELDKAGFIK
RQLVETRQITKHVAQILDSRMNTKYDENDKLIREVKVITLKSKLVSDFRKDFQFYKVREINN
YHHAHDAYLNAVVGTALIKKYPKLESEFVYGDYKVYDVRKMIAKSEQEIGKATAKYFFYSNI
MNFFKTEITLANGEIRKRPLIETNGETGEIVWDKGRDFATVRKVLSMPQVNIVKKTEVQTGG
FSKESILPKRNSDKLIARKKDWDPKKYGGFVSPTVAYSVLVVAKVEKGKSKKLKSVKELLGI
TIMERSSFEKNPIDFLEAKGYKEVKKDLIIKLPKYSLFELENGRKRMLASARELQKGNELAL
PSKYVNFLYLASHYEKLKGSPEDNEQKQLFVEQHKHYLDEIIEQISEFSKRVILADANLDKV
LSAYNKHRDKPIREQAENIIHLFTLTNLGAPAAFKYFDTTIDRKQYRSTKEVLDATLIHQSI
TGLYETRIDLSQLGGDEGADKRTADGSEFESPKKKRKV
03. monoABE8.1_bpNLS + Q154S
MSEVEFSHEYWMRHALTLAKRARDEREVPVGAVLVLNNRVIGEGWNRAIGLHDPTAHAEIMA
LRQGGLVMQNYRLIDATLYVTFEPCVMCAGAMIHSRIGRVVFGVRNAKTGAAGSLMDVLHYP
GMNHRVEITEGILADECAALLCYFFRMPRSVFNAQKKAQSSTDSGGSSGGSSGSETPGTSES
ATPESSGGSSGGSDKKYSIGLAIGTNSVGWAVITDEYKVPSKKFKVLGNTDRHSIKKNLIGA
LLFDSGETAEATRLKRTARRRYTRRKNRICYLQEIFSNEMAKVDDSFFHRLEESFLVEEDKK
HERHPIFGNIVDEVAYHEKYPTIYHLRKKLVDSTDKADLRLIYLALAHMIKFRGHFLIEGDL
NPDNSDVDKLFIQLVQTYNQLFEENPINASGVDAKAILSARLSKSRRLENLIAQLPGEKKNG
LFGNLIALSLGLTPNFKSNFDLAEDAKLQLSKDTYDDDLDNLLAQIGDQYADLFLAAKNLSD
AILLSDILRVNTEITKAPLSASMIKRYDEHHQDLTLLKALVRQQLPEKYKEIFFDQSKNGYA
GYIDGGASQEEFYKFIKPILEKMDGTEELLVKLNREDLLRKQRTFDNGSIPHQIHLGELHAI
LRRQEDFYPFLKDNREKIEKILTFRIPYYVGPLARGNSRFAWMTRKSEETITPWNFEEVVDK
GASAQSFIERMTNFDKNLPNEKVLPKHSLLYEYFTVYNELTKVKYVTEGMRKPAFLSGEQKK
AIVDLLFKTNRKVTVKQLKEDYFKKIECFDSVEISGVEDRFNASLGTYHDLLKIIKDKDFLD
NEENEDILEDIVLTLTLFEDREMIEERLKTYAHLFDDKVMKQLKRRRYTGWGRLSRKLINGI
RDKQSGKTILDELKSDGFANRNEMQLIHDDSLTFKEDIQKAQVSGQGDSLHEHIANLAGSPA
IKKGILQTVKVVDELVKVMGRHKPENIVIEMARENQTTQKGQKNSRERMKRIEEGIKELGSQ
ILKEHPVENTQLQNEKLYLYYLQNGRDMYVDQELDINRLSDYDVDHIVPQSFLKDDSIDNKV
LTRSDKNRGKSDNVPSEEVVKKMKNYWRQLLNAKLITQRKFDNLTKAERGGLSELDKAGFIK
RQLVETRQITKHVAQILDSRMNTKYDENDKLIREVKVITLKSKLVSDFRKDFQFYKVREINN
YHHAHDAYLNAVVGTALIKKYPKLESEFVYGDYKVYDVRKMIAKSEQEIGKATAKYFFYSNI
MNFFKTEITLANGEIRKRPLIETNGETGEIVWDKGRDFATVRKVLSMPQVNIVKKTEVQTGG
FSKESILPKRNSDKLIARKKDWDPKKYGGFVSPTVAYSVLVVAKVEKGKSKKLKSVKELLGI
TIMERSSFEKNPIDFLEAKGYKEVKKDLIIKLPKYSLFELENGRKRMLASARELQKGNELAL
PSKYVNFLYLASHYEKLKGSPEDNEQKQLFVEQHKHYLDEIIEQISEFSKRVILADANLDKV
LSAYNKHRDKPIREQAENIIHLFTLTNLGAPAAFKYFDTTIDRKQYRSTKEVLDATLIHQSI
TGLYETRIDLSQLGGDEGADKRTADGSEFESPKKKRKV
04. monoABE8.1_bpNLS + Y123H
MSEVEFSHEYWMRHALTLAKRARDEREVPVGAVLVLNNRVIGEGWNRAIGLHDPTAHAEIMA
LRQGGLVMQNYRLIDATLYVTFEPCVMCAGAMIHSRIGRVVFGVRNAKTGAAGSLMDVLHHP
GMNHRVEITEGILADECAALLCYFFRMPRQVFNAQKKAQSSTDSGGSSGGSSGSETPGTSES
ATPESSGGSSGGSDKKYSIGLAIGTNSVGWAVITDEYKVPSKKFKVLGNTDRHSIKKNLIGA
LLFDSGETAEATRLKRTARRRYTRRKNRICYLQEIFSNEMAKVDDSFFHRLEESFLVEEDKK
HERHPIFGNIVDEVAYHEKYPTIYHLRKKLVDSTDKADLRLIYLALAHMIKFRGHFLIEGDL
NPDNSDVDKLFIQLVQTYNQLFEENPINASGVDAKAILSARLSKSRRLENLIAQLPGEKKNG
LFGNLIALSLGLTPNFKSNFDLAEDAKLQLSKDTYDDDLDNLLAQIGDQYADLFLAAKNLSD
AILLSDILRVNTEITKAPLSASMIKRYDEHHQDLTLLKALVRQQLPEKYKEIFFDQSKNGYA
GYIDGGASQEEFYKFIKPILEKMDGTEELLVKLNREDLLRKQRTFDNGSIPHQIHLGELHAI
LRRQEDFYPFLKDNREKIEKILTFRIPYYVGPLARGNSRFAWMTRKSEETITPWNFEEVVDK
GASAQSFIERMTNFDKNLPNEKVLPKHSLLYEYFTVYNELTKVKYVTEGMRKPAFLSGEQKK
AIVDLLFKTNRKVTVKQLKEDYFKKIECFDSVEISGVEDRFNASLGTYHDLLKIIKDKDFLD
NEENEDILEDIVLTLTLFEDREMIEERLKTYAHLFDDKVMKQLKRRRYTGWGRLSRKLINGI
RDKQSGKTILDFLKSDGFANRNFMQLIHDDSLTFKEDIQKAQVSGQGDSLHEHIANLAGSPA
IKKGILQTVKVVDELVKVMGRHKPENIVIEMARENQTTQKGQKNSRERMKRIEEGIKELGSQ
ILKEHPVENTQLQNEKLYLYYLQNGRDMYVDQELDINRLSDYDVDHIVPQSFLKDDSIDNKV
LTRSDKNRGKSDNVPSEEVVKKMKNYWRQLLNAKLITQRKFDNLTKAERGGLSELDKAGFIK
RQLVETRQITKHVAQILDSRMNTKYDENDKLIREVKVITLKSKLVSDFRKDFQFYKVREINN
YHHAHDAYLNAVVGTALIKKYPKLESEFVYGDYKVYDVRKMIAKSEQEIGKATAKYFFYSNI
MNFFKTEITLANGEIRKRPLIETNGETGEIVWDKGRDFATVRKVLSMPQVNIVKKTEVQTGG
FSKESILPKRNSDKLIARKKDWDPKKYGGFVSPTVAYSVLVVAKVEKGKSKKLKSVKELLGI
TIMERSSFEKNPIDFLEAKGYKEVKKDLIIKLPKYSLFELENGRKRMLASARELQKGNELAL
PSKYVNFLYLASHYEKLKGSPEDNEQKQLFVEQHKHYLDEIIEQISEFSKRVILADANLDKV
LSAYNKHRDKPIREQAENIIHLFTLTNLGAPAAFKYFDTTIDRKQYRSTKEVLDATLIHQSI
TGLYETRIDLSQLGGDEGADKRTADGSEFESPKKKRKV
05. monoABE8.1_bpNLS + V82S
MSEVEFSHEYWMRHALTLAKRARDEREVPVGAVLVLNNRVIGEGWNRAIGLHDPTAHAEIMA
LRQGGLVMQNYRLIDATLYSTFEPCVMCAGAMIHSRIGRVVFGVRNAKTGAAGSLMDVLHYP
GMNHRVEITEGILADECAALLCYFFRMPRQVFNAQKKAQSSTDSGGSSGGSSGSETPGTSES
ATPESSGGSSGGSDKKYSIGLAIGTNSVGWAVITDEYKVPSKKFKVLGNTDRHSIKKNLIGA
LLFDSGETAEATRLKRTARRRYTRRKNRICYLQEIFSNEMAKVDDSFFHRLEESFLVEEDKK
HERHPIFGNIVDEVAYHEKYPTIYHLRKKLVDSTDKADLRLIYLALAHMIKFRGHFLIEGDL
NPDNSDVDKLFIQLVQTYNQLFEENPINASGVDAKAILSARLSKSRRLENLIAQLPGEKKNG
LFGNLIALSLGLTPNFKSNFDLAEDAKLQLSKDTYDDDLDNLLAQIGDQYADLFLAAKNLSD
AILLSDILRVNTEITKAPLSASMIKRYDEHHQDLTLLKALVRQQLPEKYKEIFFDQSKNGYA
GYIDGGASQEEFYKFIKPILEKMDGTEELLVKLNREDLLRKQRTFDNGSIPHQIHLGELHAI
LRRQEDFYPFLKDNREKIEKILTFRIPYYVGPLARGNSRFAWMTRKSEETITPWNFEEVVDK
GASAQSFIERMTNFDKNLPNEKVLPKHSLLYEYFTVYNELTKVKYVTEGMRKPAFLSGEQKK
AIVDLLFKTNRKVTVKQLKEDYFKKIECFDSVEISGVEDRFNASLGTYHDLLKIIKDKDFLD
NEENEDILEDIVLTLTLFEDREMIEERLKTYAHLFDDKVMKQLKRRRYTGWGRLSRKLINGI
RDKQSGKTILDFLKSDGFANRNFMQLIHDDSLTFKEDIQKAQVSGQGDSLHEHIANLAGSPA
IKKGILQTVKVVDELVKVMGRHKPENIVIEMARENQTTQKGQKNSRERMKRIEEGIKELGSQ
ILKEHPVENTQLQNEKLYLYYLQNGRDMYVDQELDINRLSDYDVDHIVPQSFLKDDSIDNKV
LTRSDKNRGKSDNVPSEEVVKKMKNYWRQLLNAKLITQRKFDNLTKAERGGLSELDKAGFIK
RQLVETRQITKHVAQILDSRMNTKYDENDKLIREVKVITLKSKLVSDFRKDFQFYKVREINN
YHHAHDAYLNAVVGTALIKKYPKLESEFVYGDYKVYDVRKMIAKSEQEIGKATAKYFFYSNI
MNFFKTEITLANGEIRKRPLIETNGETGEIVWDKGRDFATVRKVLSMPQVNIVKKTEVQTGG
FSKESILPKRNSDKLIARKKDWDPKKYGGFVSPTVAYSVLVVAKVEKGKSKKLKSVKELLGI
TIMERSSFEKNPIDFLEAKGYKEVKKDLIIKLPKYSLFELENGRKRMLASARELQKGNELAL
PSKYVNFLYLASHYEKLKGSPEDNEQKQLFVEQHKHYLDEIIEQISEFSKRVILADANLDKV
LSAYNKHRDKPIREQAENIIHLFTLTNLGAPAAFKYFDTTIDRKQYRSTKEVLDATLIHQSI
TGLYETRIDLSQLGGDEGADKRTADGSEFESPKKKRKV
06. monoABE8.1_bpNLS + T166R
MSEVEFSHEYWMRHALTLAKRARDEREVPVGAVLVLNNRVIGEGWNRAIGLHDPTAHAEIMA
LRQGGLVMQNYRLIDATLYVTFEPCVMCAGAMIHSRIGRVVFGVRNAKTGAAGSLMDVLHYP
GMNHRVEITEGILADECAALLCYFFRMPRQVFNAQKKAQSSRDSGGSSGGSSGSETPGTSES
ATPESSGGSSGGSDKKYSIGLAIGTNSVGWAVITDEYKVPSKKFKVLGNTDRHSIKKNLIGA
LLFDSGETAEATRLKRTARRRYTRRKNRICYLQEIFSNEMAKVDDSFFHRLEESFLVEEDKK
HERHPIFGNIVDEVAYHEKYPTIYHLRKKLVDSTDKADLRLIYLALAHMIKFRGHFLIEGDL
NPDNSDVDKLFIQLVQTYNQLFEENPINASGVDAKAILSARLSKSRRLENLIAQLPGEKKNG
LFGNLIALSLGLTPNFKSNFDLAEDAKLQLSKDTYDDDLDNLLAQIGDQYADLFLAAKNLSD
AILLSDILRVNTEITKAPLSASMIKRYDEHHQDLTLLKALVRQQLPEKYKEIFFDQSKNGYA
GYIDGGASQEEFYKFIKPILEKMDGTEELLVKLNREDLLRKQRTFDNGSIPHQIHLGELHAI
LRRQEDFYPFLKDNREKIEKILTFRIPYYVGPLARGNSRFAWMTRKSEETITPWNFEEVVDK
GASAQSFIERMTNFDKNLPNEKVLPKHSLLYEYFTVYNELTKVKYVTEGMRKPAFLSGEQKK
AIVDLLFKTNRKVTVKQLKEDYFKKIECFDSVEISGVEDRFNASLGTYHDLLKIIKDKDFLD
NEENEDILEDIVLTLTLFEDREMIEERLKTYAHLFDDKVMKQLKRRRYTGWGRLSRKLINGI
RDKQSGKTILDFLKSDGFANRNFMQLIHDDSLTFKEDIQKAQVSGQGDSLHEHIANLAGSPA
IKKGILQTVKVVDELVKVMGRHKPENIVIEMARENQTTQKGQKNSRERMKRIEEGIKELGSQ
ILKEHPVENTQLQNEKLYLYYLQNGRDMYVDQELDINRLSDYDVDHIVPQSFLKDDSIDNKV
LTRSDKNRGKSDNVPSEEVVKKMKNYWRQLLNAKLITQRKFDNLTKAERGGLSELDKAGFIK
RQLVETRQITKHVAQILDSRMNTKYDENDKLIREVKVITLKSKLVSDFRKDFQFYKVREINN
YHHAHDAYLNAVVGTALIKKYPKLESEFVYGDYKVYDVRKMIAKSEQEIGKATAKYFFYSNI
MNFFKTEITLANGEIRKRPLIETNGETGEIVWDKGRDFATVRKVLSMPQVNIVKKTEVQTGG
FSKESILPKRNSDKLIARKKDWDPKKYGGFVSPTVAYSVLVVAKVEKGKSKKLKSVKELLGI
TIMERSSFEKNPIDFLEAKGYKEVKKDLIIKLPKYSLFELENGRKRMLASARELQKGNELAL
PSKYVNFLYLASHYEKLKGSPEDNEQKQLFVEQHKHYLDEIIEQISEFSKRVILADANLDKV
LSAYNKHRDKPIREQAENIIHLFTLTNLGAPAAFKYFDTTIDRKQYRSTKEVLDATLIHQSI
TGLYETRIDLSQLGGDEGADKRTADGSEFESPKKKRKV
07. monoABE8.1_bpNLS + Q154R
MSEVEFSHEYWMRHALTLAKRARDEREVPVGAVLVLNNRVIGEGWNRAIGLHDPTAHAEIMA
LRQGGLVMQNYRLIDATLYVTFEPCVMCAGAMIHSRIGRVVFGVRNAKTGAAGSLMDVLHYP
GMNHRVEITEGILADECAALLCYFFRMPRRVFNAQKKAQSSTDSGGSSGGSSGSETPGTSES
ATPESSGGSSGGSDKKYSIGLAIGTNSVGWAVITDEYKVPSKKFKVLGNTDRHSIKKNLIGA
LLFDSGETAEATRLKRTARRRYTRRKNRICYLQEIFSNEMAKVDDSEFHRLEESFLVEEDKK
HERHPIFGNIVDEVAYHEKYPTIYHLRKKLVDSTDKADLRLIYLALAHMIKFRGHFLIEGDL
NPDNSDVDKLFIQLVQTYNQLFEENPINASGVDAKAILSARLSKSRRLENLIAQLPGEKKNG
LFGNLIALSLGLTPNFKSNFDLAEDAKLQLSKDTYDDDLDNLLAQIGDQYADLFLAAKNLSD
AILLSDILRVNTEITKAPLSASMIKRYDEHHQDLTLLKALVRQQLPEKYKEIFFDQSKNGYA
GYIDGGASQEEFYKFIKPILEKMDGTEELLVKLNREDLLRKQRTFDNGSIPHQIHLGELHAI
LRRQEDFYPFLKDNREKIEKILTFRIPYYVGPLARGNSRFAWMTRKSEETITPWNFEEVVDK
GASAQSFIERMTNFDKNLPNEKVLPKHSLLYEYFTVYNELTKVKYVTEGMRKPAFLSGEQKK
AIVDLLFKTNRKVTVKQLKEDYFKKIECFDSVEISGVEDRFNASLGTYHDLLKIIKDKDFLD
NEENEDILEDIVLTLTLFEDREMIEERLKTYAHLFDDKVMKQLKRRRYTGWGRLSRKLINGI
RDKQSGKTILDFLKSDGFANRNFMQLIHDDSLTFKEDIQKAQVSGQGDSLHEHIANLAGSPA
IKKGILQTVKVVDELVKVMGRHKPENIVIEMARENQTTQKGQKNSRERMKRIEEGIKELGSQ
ILKEHPVENTQLQNEKLYLYYLQNGRDMYVDQELDINRLSDYDVDHIVPQSFLKDDSIDNKV
LTRSDKNRGKSDNVPSEEVVKKMKNYWRQLLNAKLITQRKFDNLTKAERGGLSELDKAGFIK
RQLVETRQITKHVAQILDSRMNTKYDENDKLIREVKVITLKSKLVSDFRKDFQFYKVREINN
YHHAHDAYLNAVVGTALIKKYPKLESEFVYGDYKVYDVRKMIAKSEQEIGKATAKYFFYSNI
MNFFKTEITLANGEIRKRPLIETNGETGEIVWDKGRDFATVRKVLSMPQVNIVKKTEVQTGG
FSKESILPKRNSDKLIARKKDWDPKKYGGFVSPTVAYSVLVVAKVEKGKSKKLKSVKELLGI
TIMERSSFEKNPIDFLEAKGYKEVKKDLIIKLPKYSLFELENGRKRMLASARELQKGNELAL
PSKYVNFLYLASHYEKLKGSPEDNEQKQLFVEQHKHYLDEIIEQISEFSKRVILADANLDKV
LSAYNKHRDKPIREQAENIIHLFTLTNLGAPAAFKYFDTTIDRKQYRSTKEVLDATLIHQSI
TGLYETRIDLSQLGGDEGADKRTADGSEFESPKKKRKV
08. monoABE8.1_bpNLS + Y147R_Q154R_Y123H
MSEVEFSHEYWMRHALTLAKRARDEREVPVGAVLVLNNRVIGEGWNRAIGLHDPTAHAEIMA
LRQGGLVMQNYRLIDATLYVTFEPCVMCAGAMIHSRIGRVVFGVRNAKTGAAGSLMDVLHHP
GMNHRVEITEGILADECAALLCRFFRMPRRVFNAQKKAQSSTDSGGSSGGSSGSETPGTSES
ATPESSGGSSGGSDKKYSIGLAIGTNSVGWAVITDEYKVPSKKFKVLGNTDRHSIKKNLIGA
LLFDSGETAEATRLKRTARRRYTRRKNRICYLQEIFSNEMAKVDDSFFHRLEESFLVEEDKK
HERHPIFGNIVDEVAYHEKYPTIYHLRKKLVDSTDKADLRLIYLALAHMIKFRGHFLIEGDL
NPDNSDVDKLFIQLVQTYNQLFEENPINASGVDAKAILSARLSKSRRLENLIAQLPGEKKNG
LFGNLIALSLGLTPNFKSNFDLAEDAKLQLSKDTYDDDLDNLLAQIGDQYADLFLAAKNLSD
AILLSDILRVNTEITKAPLSASMIKRYDEHHQDLTLLKALVRQQLPEKYKEIFFDQSKNGYA
GYIDGGASQEEFYKFIKPILEKMDGTEELLVKLNREDLLRKQRTFDNGSIPHQIHLGELHAI
LRRQEDFYPFLKDNREKIEKILTFRIPYYVGPLARGNSRFAWMTRKSEETITPWNFEEVVDK
GASAQSFIERMTNFDKNLPNEKVLPKHSLLYEYFTVYNELTKVKYVTEGMRKPAFLSGEQKK
AIVDLLFKTNRKVTVKQLKEDYFKKIECFDSVEISGVEDRFNASLGTYHDLLKIIKDKDFLD
NEENEDILEDIVLTLTLFEDREMIEERLKTYAHLFDDKVMKQLKRRRYTGWGRLSRKLINGI
RDKQSGKTILDFLKSDGFANRNFMQLIHDDSLTFKEDIQKAQVSGQGDSLHEHIANLAGSPA
IKKGILQTVKVVDELVKVMGRHKPENIVIEMARENQTTQKGQKNSRERMKRIEEGIKELGSQ
ILKEHPVENTQLQNEKLYLYYLQNGRDMYVDQELDINRLSDYDVDHIVPQSFLKDDSIDNKV
LTRSDKNRGKSDNVPSEEVVKKMKNYWRQLLNAKLITQRKFDNLTKAERGGLSELDKAGFIK
RQLVETRQITKHVAQILDSRMNTKYDENDKLIREVKVITLKSKLVSDFRKDFQFYKVREINN
YHHAHDAYLNAVVGTALIKKYPKLESEFVYGDYKVYDVRKMIAKSEQEIGKATAKYFFYSNI
MNFFKTEITLANGEIRKRPLIETNGETGEIVWDKGRDFATVRKVLSMPQVNIVKKTEVQTGG
FSKESILPKRNSDKLIARKKDWDPKKYGGFVSPTVAYSVLVVAKVEKGKSKKLKSVKELLGI
TIMERSSFEKNPIDFLEAKGYKEVKKDLIIKLPKYSLFELENGRKRMLASARELQKGNELAL
PSKYVNFLYLASHYEKLKGSPEDNEQKQLFVEQHKHYLDEIIEQISEFSKRVILADANLDKV
LSAYNKHRDKPIREQAENIIHLFTLTNLGAPAAFKYFDTTIDRKQYRSTKEVLDATLIHQSI
TGLYETRIDLSQLGGDEGADKRTADGSEFESPKKKRKV
09. monoABE8.1_bpNLS + Y147R_Q154R_I76Y
MSEVEFSHEYWMRHALTLAKRARDEREVPVGAVLVLNNRVIGEGWNRAIGLHDPTAHAEIMA
LRQGGLVMQNYRLYDATLYVTFEPCVMCAGAMIHSRIGRVVFGVRNAKTGAAGSLMDVLHYP
GMNHRVEITEGILADECAALLCRFFRMPRRVFNAQKKAQSSTDSGGSSGGSSGSETPGTSES
ATPESSGGSSGGSDKKYSIGLAIGTNSVGWAVITDEYKVPSKKFKVLGNTDRHSIKKNLIGA
LLFDSGETAEATRLKRTARRRYTRRKNRICYLQEIFSNEMAKVDDSFFHRLEESFLVEEDKK
HERHPIFGNIVDEVAYHEKYPTIYHLRKKLVDSTDKADLRLIYLALAHMIKFRGHFLIEGDL
NPDNSDVDKLFIQLVQTYNQLFEENPINASGVDAKAILSARLSKSRRLENLIAQLPGEKKNG
LFGNLIALSLGLTPNFKSNFDLAEDAKLQLSKDTYDDDLDNLLAQIGDQYADLFLAAKNLSD
AILLSDILRVNTEITKAPLSASMIKRYDEHHQDLTLLKALVRQQLPEKYKEIFFDQSKNGYA
GYIDGGASQEEFYKFIKPILEKMDGTEELLVKLNREDLLRKQRTFDNGSIPHQIHLGELHAI
LRRQEDFYPFLKDNREKIEKILTFRIPYYVGPLARGNSRFAWMTRKSEETITPWNFEEVVDK
GASAQSFIERMTNFDKNLPNEKVLPKHSLLYEYFTVYNELTKVKYVTEGMRKPAFLSGEQKK
AIVDLLFKTNRKVTVKQLKEDYFKKIECFDSVEISGVEDRFNASLGTYHDLLKIIKDKDFLD
NEENEDILEDIVLTLTLFEDREMIEERLKTYAHLFDDKVMKQLKRRRYTGWGRLSRKLINGI
RDKQSGKTILDFLKSDGFANRNFMQLIHDDSLTFKEDIQKAQVSGQGDSLHEHIANLAGSPA
IKKGILQTVKVVDELVKVMGRHKPENIVIEMARENQTTQKGQKNSRERMKRIEEGIKELGSQ
ILKEHPVENTQLQNEKLYLYYLQNGRDMYVDQELDINRLSDYDVDHIVPQSELKDDSIDNKV
LTRSDKNRGKSDNVPSEEVVKKMKNYWRQLLNAKLITQRKFDNLTKAERGGLSELDKAGFIK
RQLVETRQITKHVAQILDSRMNTKYDENDKLIREVKVITLKSKLVSDFRKDFQFYKVREINN
YHHAHDAYLNAVVGTALIKKYPKLESEFVYGDYKVYDVRKMIAKSEQEIGKATAKYFFYSNI
MNFFKTEITLANGEIRKRPLIETNGETGEIVWDKGRDFATVRKVLSMPQVNIVKKTEVQTGG
FSKESILPKRNSDKLIARKKDWDPKKYGGFVSPTVAYSVLVVAKVEKGKSKKLKSVKELLGI
TIMERSSFEKNPIDFLEAKGYKEVKKDLIIKLPKYSLFELENGRKRMLASARELQKGNELAL
PSKYVNFLYLASHYEKLKGSPEDNEQKQLFVEQHKHYLDEIIEQISEFSKRVILADANLDKV
LSAYNKHRDKPIREQAENIIHLFTLTNLGAPAAFKYFDTTIDRKQYRSTKEVLDATLIHQSI
TGLYETRIDLSQLGGDEGADKRTADGSEFESPKKKRKV
10. monoABE8.1_bpNLS + Y147R_Q154R_T166R
MSEVEFSHEYWMRHALTLAKRARDEREVPVGAVLVLNNRVIGEGWNRAIGLHDPTAHAEIMA
LRQGGLVMQNYRLIDATLYVTFEPCVMCAGAMIHSRIGRVVFGVRNAKTGAAGSLMDVLHYP
GMNHRVEITEGILADECAALLCRFFRMPRRVFNAQKKAQSSRDSGGSSGGSSGSETPGTSES
ATPESSGGSSGGSDKKYSIGLAIGTNSVGWAVITDEYKVPSKKFKVLGNTDRHSIKKNLIGA
LLFDSGETAEATRLKRTARRRYTRRKNRICYLQEIFSNEMAKVDDSFFHRLEESFLVEEDKK
HERHPIFGNIVDEVAYHEKYPTIYHLRKKLVDSTDKADLRLIYLALAHMIKFRGHFLIEGDL
NPDNSDVDKLFIQLVQTYNQLFEENPINASGVDAKAILSARLSKSRRLENLIAQLPGEKKNG
LFGNLIALSLGLTPNFKSNFDLAEDAKLQLSKDTYDDDLDNLLAQIGDQYADLFLAAKNLSD
AILLSDILRVNTEITKAPLSASMIKRYDEHHQDLTLLKALVRQQLPEKYKEIFFDQSKNGYA
GYIDGGASQEEFYKFIKPILEKMDGTEELLVKLNREDLLRKQRTFDNGSIPHQIHLGELHAI
LRRQEDFYPFLKDNREKIEKILTFRIPYYVGPLARGNSRFAWMTRKSEETITPWNFEEVVDK
GASAQSFIERMTNFDKNLPNEKVLPKHSLLYEYFTVYNELTKVKYVTEGMRKPAFLSGEQKK
AIVDLLFKTNRKVTVKQLKEDYFKKIECFDSVEISGVEDRFNASLGTYHDLLKIIKDKDFLD
NEENEDILEDIVLTLTLFEDREMIEERLKTYAHLFDDKVMKQLKRRRYTGWGRLSRKLINGI
RDKQSGKTILDFLKSDGFANRNFMQLIHDDSLTFKEDIQKAQVSGQGDSLHEHIANLAGSPA
IKKGILQTVKVVDELVKVMGRHKPENIVIEMARENQTTQKGQKNSRERMKRIEEGIKELGSQ
ILKEHPVENTQLQNEKLYLYYLQNGRDMYVDQELDINRLSDYDVDHIVPQSFLKDDSIDNKV
LTRSDKNRGKSDNVPSEEVVKKMKNYWRQLLNAKLITQRKFDNLTKAERGGLSELDKAGFIK
RQLVETRQITKHVAQILDSRMNTKYDENDKLIREVKVITLKSKLVSDFRKDFQFYKVREINN
YHHAHDAYLNAVVGTALIKKYPKLESEFVYGDYKVYDVRKMIAKSEQEIGKATAKYFFYSNI
MNFFKTEITLANGEIRKRPLIETNGETGEIVWDKGRDFATVRKVLSMPQVNIVKKTEVQTGG
FSKESILPKRNSDKLIARKKDWDPKKYGGFVSPTVAYSVLVVAKVEKGKSKKLKSVKELLGI
TIMERSSFEKNPIDELEAKGYKEVKKDLIIKLPKYSLFELENGRKRMLASARELQKGNELAL
PSKYVNFLYLASHYEKLKGSPEDNEQKQLFVEQHKHYLDEIIEQISEFSKRVILADANLDKV
LSAYNKHRDKPIREQAENIIHLFTLTNLGAPAAFKYFDTTIDRKQYRSTKEVLDATLIHQSI
TGLYETRIDLSQLGGDEGADKRTADGSEFESPKKKRKV
11. monoABE8.1_bpNLS + Y147T_Q154R
MSEVEFSHEYWMRHALTLAKRARDEREVPVGAVLVLNNRVIGEGWNRAIGLHDPTAHAEIMA
LRQGGLVMQNYRLIDATLYVTFEPCVMCAGAMIHSRIGRVVFGVRNAKTGAAGSLMDVLHYP
GMNHRVEITEGILADECAALLCTFFRMPRRVFNAQKKAQSSTDSGGSSGGSSGSETPGTSES
ATPESSGGSSGGSDKKYSIGLAIGTNSVGWAVITDEYKVPSKKFKVLGNTDRHSIKKNLIGA
LLFDSGETAEATRLKRTARRRYTRRKNRICYLQEIFSNEMAKVDDSFFHRLEESFLVEEDKK
HERHPIFGNIVDEVAYHEKYPTIYHLRKKLVDSTDKADLRLIYLALAHMIKFRGHFLIEGDL
NPDNSDVDKLFIQLVQTYNQLFEENPINASGVDAKAILSARLSKSRRLENLIAQLPGEKKNG
LFGNLIALSLGLTPNFKSNFDLAEDAKLQLSKDTYDDDLDNLLAQIGDQYADLFLAAKNLSD
AILLSDILRVNTEITKAPLSASMIKRYDEHHQDLTLLKALVRQQLPEKYKEIFFDQSKNGYA
GYIDGGASQEEFYKFIKPILEKMDGTEELLVKLNREDLLRKQRTFDNGSIPHQIHLGELHAI
LRRQEDFYPFLKDNREKIEKILTFRIPYYVGPLARGNSRFAWMTRKSEETITPWNFEEVVDK
GASAQSFIERMTNFDKNLPNEKVLPKHSLLYEYFTVYNELTKVKYVTEGMRKPAFLSGEQKK
AIVDLLFKTNRKVTVKQLKEDYFKKIECFDSVEISGVEDRFNASLGTYHDLLKIIKDKDFLD
NEENEDILEDIVLTLTLFEDREMIEERLKTYAHLFDDKVMKQLKRRRYTGWGRLSRKLINGI
RDKQSGKTILDFLKSDGFANRNFMQLIHDDSLTFKEDIQKAQVSGQGDSLHEHIANLAGSPA
IKKGILQTVKVVDELVKVMGRHKPENIVIEMARENQTTQKGQKNSRERMKRIEEGIKELGSQ
ILKEHPVENTQLQNEKLYLYYLQNGRDMYVDQELDINRLSDYDVDHIVPQSFLKDDSIDNKV
LTRSDKNRGKSDNVPSEEVVKKMKNYWRQLLNAKLITQRKFDNLTKAERGGLSELDKAGFIK
RQLVETRQITKHVAQILDSRMNTKYDENDKLIREVKVITLKSKLVSDFRKDFQFYKVREINN
YHHAHDAYLNAVVGTALIKKYPKLESEFVYGDYKVYDVRKMIAKSEQEIGKATAKYFFYSNI
MNFFKTEITLANGEIRKRPLIETNGETGEIVWDKGRDFATVRKVLSMPQVNIVKKTEVQTGG
FSKESILPKRNSDKLIARKKDWDPKKYGGFVSPTVAYSVLVVAKVEKGKSKKLKSVKELLGI
TIMERSSFEKNPIDFLEAKGYKEVKKDLIIKLPKYSLFELENGRKRMLASARELQKGNELAL
PSKYVNFLYLASHYEKLKGSPEDNEQKQLFVEQHKHYLDEIIEQISEFSKRVILADANLDKV
LSAYNKHRDKPIREQAENIIHLFTLTNLGAPAAFKYFDTTIDRKQYRSTKEVLDATLIHQSI
TGLYETRIDLSQLGGDEGADKRTADGSEFESPKKKRKV
12. monoABE8.1_bpNLS + Y147T_Q154S
MSEVEFSHEYWMRHALTLAKRARDEREVPVGAVLVLNNRVIGEGWNRAIGLHDPTAHAEIMA
LRQGGLVMQNYRLIDATLYVTFEPCVMCAGAMIHSRIGRVVFGVRNAKTGAAGSLMDVLHYP
GMNHRVEITEGILADECAALLCTFFRMPRSVFNAQKKAQSSTDSGGSSGGSSGSETPGTSES
ATPESSGGSSGGSDKKYSIGLAIGTNSVGWAVITDEYKVPSKKFKVLGNTDRHSIKKNLIGA
LLFDSGETAEATRLKRTARRRYTRRKNRICYLQEIFSNEMAKVDDSFFHRLEESFLVEEDKK
HERHPIFGNIVDEVAYHEKYPTIYHLRKKLVDSTDKADLRLIYLALAHMIKFRGHFLIEGDL
NPDNSDVDKLFIQLVQTYNQLFEENPINASGVDAKAILSARLSKSRRLENLIAQLPGEKKNG
LFGNLIALSLGLTPNFKSNFDLAEDAKLQLSKDTYDDDLDNLLAQIGDQYADLFLAAKNLSD
AILLSDILRVNTEITKAPLSASMIKRYDEHHQDLTLLKALVRQQLPEKYKEIFFDQSKNGYA
GYIDGGASQEEFYKFIKPILEKMDGTEELLVKLNREDLLRKQRTFDNGSIPHQIHLGELHAI
LRRQEDFYPFLKDNREKIEKILTFRIPYYVGPLARGNSRFAWMTRKSEETITPWNFEEVVDK
GASAQSFIERMTNFDKNLPNEKVLPKHSLLYEYFTVYNELTKVKYVTEGMRKPAFLSGEQKK
AIVDLLFKTNRKVTVKQLKEDYFKKIECFDSVEISGVEDRFNASLGTYHDLLKIIKDKDFLD
NEENEDILEDIVLTLTLFEDREMIEERLKTYAHLFDDKVMKQLKRRRYTGWGRLSRKLINGI
RDKQSGKTILDFLKSDGFANRNFMQLIHDDSLTFKEDIQKAQVSGQGDSLHEHIANLAGSPA
IKKGILQTVKVVDELVKVMGRHKPENIVIEMARENQTTQKGQKNSRERMKRIEEGIKELGSQ
ILKEHPVENTQLQNEKLYLYYLQNGRDMYVDQELDINRLSDYDVDHIVPQSFLKDDSIDNKV
LTRSDKNRGKSDNVPSEEVVKKMKNYWRQLLNAKLITQRKFDNLTKAERGGLSELDKAGFIK
RQLVETRQITKHVAQILDSRMNTKYDENDKLIREVKVITLKSKLVSDFRKDFQFYKVREINN
YHHAHDAYLNAVVGTALIKKYPKLESEFVYGDYKVYDVRKMIAKSEQEIGKATAKYFFYSNI
MNFFKTEITLANGEIRKRPLIETNGETGEIVWDKGRDFATVRKVLSMPQVNIVKKTEVQTGG
FSKESILPKRNSDKLIARKKDWDPKKYGGFVSPTVAYSVLVVAKVEKGKSKKLKSVKELLGI
TIMERSSFEKNPIDFLEAKGYKEVKKDLIIKLPKYSLFELENGRKRMLASARELQKGNELAL
PSKYVNFLYLASHYEKLKGSPEDNEQKQLFVEQHKHYLDEIIEQISEFSKRVILADANLDKV
LSAYNKHRDKPIREQAENIIHLFTLTNLGAPAAFKYFDTTIDRKQYRSTKEVLDATLIHQSI
TGLYETRIDLSQLGGDEGADKRTADGSEFESPKKKRKV
13. monoABE8.1_bpNLS + H123Y123H_Y147R_Q154R_I76Y
MSEVEFSHEYWMRHALTLAKRARDEREVPVGAVLVLNNRVIGEGWNRAIGLHDPTAHAEIMA
LRQGGLVMQNYRLYDATLYVTFEPCVMCAGAMIHSRIGRVVFGVRNAKTGAAGSLMDVLHHP
GMNHRVEITEGILADECAALLCRFFRMPRRVFNAQKKAQSSTDSGGSSGGSSGSETPGTSES
ATPESSGGSSGGSDKKYSIGLAIGTNSVGWAVITDEYKVPSKKFKVLGNTDRHSIKKNLIGA
LLFDSGETAEATRLKRTARRRYTRRKNRICYLQEIFSNEMAKVDDSFFHRLEESFLVEEDKK
HERHPIFGNIVDEVAYHEKYPTIYHLRKKLVDSTDKADLRLIYLALAHMIKFRGHFLIEGDL
NPDNSDVDKLEIQLVQTYNQLFEENPINASGVDAKAILSARLSKSRRLENLIAQLPGEKKNG
LFGNLIALSLGLTPNFKSNFDLAEDAKLQLSKDTYDDDLDNLLAQIGDQYADLFLAAKNLSD
AILLSDILRVNTEITKAPLSASMIKRYDEHHQDLTLLKALVRQQLPEKYKEIFFDQSKNGYA
GYIDGGASQEEFYKFIKPILEKMDGTEELLVKLNREDLLRKQRTFDNGSIPHQIHLGELHAI
LRRQEDFYPFLKDNREKIEKILTFRIPYYVGPLARGNSRFAWMTRKSEETITPWNFEEVVDK
GASAQSFIERMTNFDKNLPNEKVLPKHSLLYEYFTVYNELTKVKYVTEGMRKPAFLSGEQKK
AIVDLLFKTNRKVTVKQLKEDYFKKIECFDSVEISGVEDRFNASLGTYHDLLKIIKDKDFLD
NEENEDILEDIVLTLTLFEDREMIEERLKTYAHLFDDKVMKQLKRRRYTGWGRLSRKLINGI
RDKQSGKTILDFLKSDGFANRNFMQLIHDDSLTFKEDIQKAQVSGQGDSLHEHIANLAGSPA
IKKGILQTVKVVDELVKVMGRHKPENIVIEMARENQTTQKGQKNSRERMKRIEEGIKELGSQ
ILKEHPVENTQLQNEKLYLYYLQNGRDMYVDQELDINRLSDYDVDHIVPQSFLKDDSIDNKV
LTRSDKNRGKSDNVPSEEVVKKMKNYWRQLLNAKLITQRKFDNLTKAERGGLSELDKAGFIK
RQLVETRQITKHVAQILDSRMNTKYDENDKLIREVKVITLKSKLVSDFRKDFQFYKVREINN
YHHAHDAYLNAVVGTALIKKYPKLESEFVYGDYKVYDVRKMIAKSEQEIGKATAKYFFYSNI
MNFFKTEITLANGEIRKRPLIETNGETGEIVWDKGRDFATVRKVLSMPQVNIVKKTEVQTGG
FSKESILPKRNSDKLIARKKDWDPKKYGGFVSPTVAYSVLVVAKVEKGKSKKLKSVKELLGI
TIMERSSFEKNPIDFLEAKGYKEVKKDLIIKLPKYSLFELENGRKRMLASARELQKGNELAL
PSKYVNFLYLASHYEKLKGSPEDNEQKQLFVEQHKHYLDEIIEQISEFSKRVILADANLDKV
LSAYNKHRDKPIREQAENIIHLFTLTNLGAPAAFKYFDTTIDRKQYRSTKEVLDATLIHQSI
TGLYETRIDLSQLGGDEGADKRTADGSEFESPKKKRKV
14. monoABE8.1_bpNLS + V82S + Q154R
MSEVEFSHEYWMRHALTLAKRARDEREVPVGAVLVLNNRVIGEGWNRAIGLHDPTAHAEIMA
LRQGGLVMQNYRLIDATLYSTFEPCVMCAGAMIHSRIGRVVFGVRNAKTGAAGSLMDVLHYP
GMNHRVEITEGILADECAALLCYFFRMPRRVFNAQKKAQSSTDSGGSSGGSSGSETPGTSES
ATPESSGGSSGGSDKKYSIGLAIGTNSVGWAVITDEYKVPSKKFKVLGNTDRHSIKKNLIGA
LLFDSGETAEATRLKRTARRRYTRRKNRICYLQEIFSNEMAKVDDSFFHRLEESFLVEEDKK
HERHPIFGNIVDEVAYHEKYPTIYHLRKKLVDSTDKADLRLIYLALAHMIKFRGHFLIEGDL
NPDNSDVDKLFIQLVQTYNQLFEENPINASGVDAKAILSARLSKSRRLENLIAQLPGEKKNG
LFGNLIALSLGLTPNFKSNFDLAEDAKLQLSKDTYDDDLDNLLAQIGDQYADLFLAAKNLSD
AILLSDILRVNTEITKAPLSASMIKRYDEHHQDLTLLKALVRQQLPEKYKEIFFDQSKNGYA
GYIDGGASQEEFYKFIKPILEKMDGTEELLVKLNREDLLRKQRTFDNGSIPHQIHLGELHAI
LRRQEDFYPFLKDNREKIEKILTFRIPYYVGPLARGNSRFAWMTRKSEETITPWNFEEVVDK
GASAQSFIERMTNFDKNLPNEKVLPKHSLLYEYFTVYNELTKVKYVTEGMRKPAFLSGEQKK
AIVDLLFKTNRKVTVKQLKEDYFKKIECFDSVEISGVEDRENASLGTYHDLLKIIKDKDELD
NEENEDILEDIVLTLTLFEDREMIEERLKTYAHLFDDKVMKQLKRRRYTGWGRLSRKLINGI
RDKQSGKTILDFLKSDGFANRNFMQLIHDDSLTFKEDIQKAQVSGQGDSLHEHIANLAGSPA
IKKGILQTVKVVDELVKVMGRHKPENIVIEMARENQTTQKGQKNSRERMKRIEEGIKELGSQ
ILKEHPVENTQLQNEKLYLYYLQNGRDMYVDQELDINRLSDYDVDHIVPQSFLKDDSIDNKV
LTRSDKNRGKSDNVPSEEVVKKMKNYWRQLLNAKLITQRKFDNLTKAERGGLSELDKAGFIK
RQLVETRQITKHVAQILDSRMNTKYDENDKLIREVKVITLKSKLVSDFRKDFQFYKVREINN
YHHAHDAYLNAVVGTALIKKYPKLESEFVYGDYKVYDVRKMIAKSEQEIGKATAKYFFYSNI
MNFFKTEITLANGEIRKRPLIETNGETGEIVWDKGRDFATVRKVLSMPQVNIVKKTEVQTGG
FSKESILPKRNSDKLIARKKDWDPKKYGGFVSPTVAYSVLVVAKVEKGKSKKLKSVKELLGI
TIMERSSFEKNPIDFLEAKGYKEVKKDLIIKLPKYSLFELENGRKRMLASARELQKGNELAL
PSKYVNFLYLASHYEKLKGSPEDNEQKQLFVEQHKHYLDEIIEQISEFSKRVILADANLDKV
LSAYNKHRDKPIREQAENIIHLFTLTNLGAPAAFKYFDTTIDRKQYRSTKEVLDATLIHQS1
TGLYETRIDLSQLGGDEGADKRTADGSEFESPKKKRKV

### ABE9

[0719] Provided herein are ninth generation base editors comprising an adenosine deaminase variant. Tables 14 and 18 herein present novel ABE9 nucleobase editors in which the adenosine deaminase variant (TadA*9) comprises an amino acid sequence which contains alterations relative to an ABE 7*10 reference sequence as described herein. The term “monomers” as used in Tables 14 and 18 refers to a monomeric form of TadA*7.10 comprising the alterations described in Tables 14 and 18. The term “heterodimers” as used in Tables 14 and 18 refers to the specified wild-type E. coli TadA adenosine deaminase fused to a TadA*7.10 comprising the alterations described in Tables 14 and 18 and as described herein.

TABLE 14

| | ABE9 name | Amino acid alterations | | | | |
|---|---|---|---|---|---|---|
| ABE9 Plasmid | (monomer or | relative to Tad*7.10 amino | | Plasmid | | |
| name | heterodimer) | acid sequence | Maintenance | Origin | Promoter | Vector |
| pNMG-B531 | ABE9.1 (also termed | E25F, V82S, Y123H, T133K, | Carb | pBR322 | CMV | mammalian |
| | ABE9.2m)_monomer | Y147R, Q154R | | | | expression |
| | | | | | | vector |
| pNMG-B532 | ABE9.2 (also | E25F, V82S, Y123H, Y147R, | Carb | pBR322 | CMV | mammalian |
| | termed)_monomer | Q154R | | | | expression |
| | | | | | | vector |
| pNMG-B533 | ABE9.3 (also | V82S, Y123H, P124W, Y147R, | Carb | pBR322 | CMV | mammalian |
| | termed)_monomer | Q154R | | | | expression |
| | | | | | | vector |
| pNMG-B534 | ABE9.4 (also termed | L51W, V82S, Y123H, C146R, | Carb | pBR322 | CMV | mammalian |
| | ABE9.5m)_monomer | Y147R, Q154R | | | | expression |
| | | | | | | vector |
| pNMG-B535 | ABE9.5 (also termed | P54C, V82S, Y123H, Y147R, | Carb | pBR322 | CMV | mammalian |
| | ABE9.6m)_monomer | Q154R | | | | expression |
| | | | | | | vector |
| pNMG-B536 | ABE9.6 (also termed | Y73S, V82S, Y123H, Y147R, | Carb | pBR322 | CMV | mammalian |
| | ABE9.7m)_monomer | Q154R | | | | expression |
| | | | | | | vector |
| pNMG-B537 | ABE9.7 (also termed | N38G, V82T, Y123H, Y147R, | Carb | pBR322 | CMV | mammalian |
| | ABE9.8m)_monomer | Q154R | | | | expression |
| | | | | | | vector |
| pNMG-B538 | ABE9.8 (also termed | R23H, V82S, Y123H, Y147R, | Carb | pBR322 | CMV | mammalian |
| | ABE9.9m)_monomer | Q154R | | | | expression |
| | | | | | | vector |
| pNMG-B539 | ABE9.9 (also termed | R21N, V82S, Y123H, Y147R, | Carb | pBR322 | CMV | mammalian |
| | ABE9.11m)_monomer | Q154R | | | | expression |
| | | | | | | vector |
| pNMG-B540 | ABE9.10 (also termed | V82S, Y123H, Y147R, Q154R, | Carb | pBR322 | CMV | mammalian |
| | ABE9.13m)_monomer | A158K | | | | expression |
| | | | | | | vector |
| pNMG-B541 | ABE9.11 (also termed | N72K, V82S, Y123H, D139L, | Carb | pBR322 | CMV | mammalian |
| | ABE9.14m)_monomer | Y147R, Q154R, | | | | expression |
| | | | | | | vector |
| pNMG-B542 | ABE9.12 (also termed | E25F, V82S, Y123H, D139M, | Carb | pBR322 | CMV | mammalian |
| | ABE9.15m)_monomer | Y147R, Q154R | | | | expression |
| | | | | | | vector |
| pNMG-B543 | ABE9.13 (also termed | M70V, V82S, M94V, Y123H, | Carb | pBR322 | CMV | mammalian |
| | ABE9.16m)_monomer | Y147R, Q154R | | | | expression |
| | | | | | | vector |
| pNMG-B544 | ABE9.14 (also termed | Q71M, V82S, Y123H, Y147R, | Carb | pBR322 | CMV | mammalian |
| | ABE9.17m)_monomer | Q154R | | | | expression |
| | | | | | | vector |
| pNMG-B545 | ABE9.15 (also termed | E25F, V82S, Y123H, T133K, | Carb | pBR322 | CMV | mammalian |
| | ABE9.2d)_heterodimer | Y147R, Q154R | | | | expression |
| | | | | | | vector |
| pNMG-B546 | ABE9.16 (also termed | E25F, V82S, Y123H, Y147R, | Carb | pBR322 | CMV | mammalian |
| | ABE9.3d)_heterodimer | Q154R | | | | expression |
| | | | | | | vector |
| pNMG-B547 | ABE9.17 (also termed | V82S, Y123H, P124W, | Carb | pBR322 | CMV | mammalian |
| | ABE9.4d)_heterodimer | Y147R, Q154R | | | | expression |
| | | | | | | vector |
| pNMG-B548 | ABE9.18 (also termed | L51W, V82S, Y123H, C146R, | Carb | pBR322 | CMV | mammalian |
| | ABE9.5d)_heterodimer | Y147R, Q154R | | | | expression |
| | | | | | | vector |
| pNMG-B549 | ABE9.19 (also termed | P54C, V82S, Y123H, Y147R, | Carb | pBR322 | CMV | mammalian |
| | ABE9.6d)_heterodimer | Q154R | | | | expression |
| | | | | | | vector |
| pNMG-B550 | ABE9.20 (also termed | Y73S, V82S, Y123H, Y147R, | Carb | pBR322 | CMV | mammalian |
| | ABE9.7d)_heterodimer | Q154R | | | | expression |
| | | | | | | vector |
| pNMG-B551 | ABE9.21 (also termed | N38G, V82T, Y123H, Y147R, | Carb | pBR322 | CMV | mammalian |
| | ABE9.8d)_heterodimer | Q154R | | | | expression |
| | | | | | | vector |
| pNMG-B552 | ABE9.22 (also termed | R23H, V82S, Y123H, Y147R, | Carb | pBR322 | CMV | mammalian |
| | ABE9.9d)_heterodimer | Q154R | | | | expression |
| | | | | | | vector |
| pNMG-B553 | ABE9.23 (also termed | R21N, V82S, Y123H, Y147R, | Carb | pBR322 | CMV | mammalian |
| | ABE9.11d)_heterodimer | Q154R | | | | expression |
| | | | | | | vector |
| pNMG-B554 | ABE9.24 (also termed | V82S, Y123H, Y147R, Q154R, | Carb | pBR322 | CMV | mammalian |
| | ABE9.13d)_heterodimer | A158K | | | | expression |
| | | | | | | vector |
| pNMG-B555 | ABE9.25 (also termed | N72K, V82S, Y123H, D139L, Y147R, | Carb | pBR322 | CMV | mammalian |
| | ABE9.14d)_heterodimer | Q154R, | | | | expression |
| | | | | | | vector |
| pNMG-B556 | ABE9.26 (also termed | E25F, V82S, Y123H, D139M, Y147R, | Carb | pBR322 | CMV | mammalian |
| | ABE9.15d)_heterodimer | Q154R | | | | expression |
| | | | | | | vector |
| pNMG-B557 | ABE9.27 (also termed | M70V, V82S, M94V, Y123H, Y147R, | Carb | pBR322 | CMV | mammalian |
| | ABE9.16d)_heterodimer | Q154R | | | | expression |
| | | | | | | vector |
| pNMG-B558 | ABE9.28 (also termed | Q71M, V82S, Y123H, Y147R, Q154R | Carb | pBR322 | CMV | mammalian |
| | ABE9.17d)_heterodimer | | | | | expression |
| | | | | | | vector |
| pNMG-B559 | ABE9.29_monomer | E25F_I76Y_V82S_Y123H_Y147R_Q154R | Carb | pBR322 | CMV | mammalian |
| | | | | | | expression |
| | | | | | | vector |
| pNMG-B560 | ABE9.30_monomer | I76Y_V82T_Y123H_Y147R_Q154R | Carb | pBR322 | CMV | mammalian |
| | | | | | | expression |
| | | | | | | vector |
| pNMG-B561 | ABE9.31_monomer | N38G_I76Y_V82S_Y123H_Y147R_Q154R | Carb | pBR322 | CMV | mammalian |
| | | | | | | expression |
| | | | | | | vector |
| pNMG-B562 | ABE9.32_monomer | N38G_I76Y_V82T_Y123H_Y147R_Q154R | Carb | pBR322 | CMV | mammalian |
| | | | | | | expression |
| | | | | | | vector |
| pNMG-B563 | ABE9.33_monomer | R23H_I76Y_V82S_Y123H_Y147R_Q154R | Carb | pBR322 | CMV | mammalian |
| | | | | | | expression |
| | | | | | | vector |
| pNMG-B564 | ABE9.34_monomer | P54C_I76Y_V82S_Y123H_Y147R_Q154R | Carb | pBR322 | CMV | mammalian |
| | | | | | | expression |
| | | | | | | vector |
| pNMG-B565 | ABE9.35_monomer | R21N_I76Y_V82S_Y123H_Y147R_Q154R | Carb | pBR322 | CMV | mammalian |
| | | | | | | expression |
| | | | | | | vector |
| pNMG-B566 | ABE9.36_monomer | I76Y_V82S_Y123H_D138M_Y147R_Q154R | Carb | pBR322 | CMV | mammalian |
| | | | | | | expression |
| | | | | | | vector |
| pNMG-B567 | ABE9.37_monomer | Y72S_I76Y_V82S_Y123H_Y147R_Q154R | Carb | pBR322 | CMV | mammalian |
| | | | | | | expression |
| | | | | | | vector |
| pNMG-B568 | ABE9.38_heterodimer | E25F_I76Y_V82S_Y123H_Y147R_Q154R | Carb | pBR322 | CMV | mammalian |
| | | | | | | expression |
| | | | | | | vector |
| pNMG-B569 | ABE9.39_heterodimer | I76Y_V82T_Y123H_Y147R_Q154R | Carb | pBR322 | CMV | mammalian |
| | | | | | | expression |
| | | | | | | vector |
| pNMG-B570 | ABE9.40_heterodimer | N38G_I76Y_V82S_Y123H_Y147R_Q154R | Carb | pBR322 | CMV | mammalian |
| | | | | | | expression |
| | | | | | | vector |
| pNMG-B571 | ABE9.41_heterodimer | N38G_I76Y_V82T_Y123H_Y147R_Q154R | Carb | pBR322 | CMV | mammalian |
| | | | | | | expression |
| | | | | | | vector |
| pNMG-B572 | ABE9.42_heterodimer | R23H_I76Y_V82S_Y123H_Y147R_Q154R | Carb | pBR322 | CMV | mammalian |
| | | | | | | expression |
| | | | | | | vector |
| pNMG-B573 | ABE9.43_heterodimer | P54C_I76Y_V82S_Y123H_Y147R_Q154R | Carb | pBR322 | CMV | mammalian |
| | | | | | | expression |
| | | | | | | vector |
| pNMG-B574 | ABE9.44_heterodimer | R21N_I76Y_V82S_Y123H_Y147R_Q154R | Carb | pBR322 | CMV | mammalian |
| | | | | | | expression |
| | | | | | | vector |
| pNMG-B575 | ABE9.45_heterodimer | I76Y_V82S_Y123H_D138M_Y147R_Q154R | Carb | pBR322 | CMV | mammalian |
| | | | | | | expression |
| | | | | | | vector |
| pNMG-B576 | ABE9.46_heterodimer | Y72S_I76Y_V82S_Y123H_Y147R_Q154R | Carb | pBR322 | CMV | mammalian |
| | | | | | | expression |
| | | | | | | vector |
| pNMG-B623 | ABE9.47_monomer | N72K_V82S, Y123H, Y147R, Q154R | Carb | pBR322 | CMV | mammalian |
| | | | | | | expression |
| | | | | | | vector |
| pNMG-B624 | ABE9.48_monomer | Q71M_V82S, Y123H, Y147R, Q154R | Carb | pBR322 | CMV | mammalian |
| | | | | | | expression |
| | | | | | | vector |
| pNMG-B625 | ABE9.49_monomer | M70V, V82S, M94V, Y123H, Y147R, | Carb | pBR322 | CMV | mammalian |
| | | Q154R | | | | expression |
| | | | | | | vector |
| pNMG-B626 | ABE9.50_monomer | V82S, Y123H, T133K, Y147R, | Carb | pBR322 | CMV | mammalian |
| | | Q154R | | | | expression |
| | | | | | | vector |
| pNMG-B627 | ABE9.51_monomer | V82S, Y123H, T133K, Y147R, | Carb | pBR322 | CMV | mammalian |
| | | Q154R, A158K | | | | expression |
| | | | | | | vector |
| pNMG-B628 | ABE9.52_monomer | M70V, Q71M, N72K, V82S, Y123H, | Carb | pBR322 | CMV | mammalian |
| | | Y147R, Q154R | | | | expression |
| | | | | | | vector |
| pNMG-B629 | ABE9.53_heterodimer | N72K_V82S, Y123H, Y147R, | Carb | pBR322 | CMV | mammalian |
| | | Q154R | | | | expression |
| | | | | | | vector |
| pNMG-B630 | ABE9.54_heterodimer | Q71M_V82S, Y123H, Y147R, | Carb | pBR322 | CMV | mammalian |
| | | Q154R | | | | expression |
| | | | | | | vector |
| pNMG-B631 | ABE9.55_heterodimer | M70V, V82S, M94V, Y123H, | Carb | pBR322 | CMV | mammalian |
| | | Y147R, Q154R | | | | expression |
| | | | | | | vector |
| pNMG-B632 | ABE9.56_heterodimer | V82S, Y123H, T133K, Y147R, | Carb | pBR322 | CMV | mammalian |
| | | Q154R | | | | expression |
| | | | | | | vector |
| pNMG-B633 | ABE9.57_heterodimer | V82S, Y123H, T133K, Y147R, | Carb | pBR322 | CMV | mammalian |
| | | Q154R, A158K | | | | expression |
| | | | | | | vector |
| pNMG-B634 | ABE9.58_heterodimer | M70V, Q71M, N72K, V82S, | Carb | pBR322 | CMV | mammalian |
| | | Y123H, Y147R, Q154R | | | | expression |
| | | | | | | vector |

[0720] In some embodiments, the base editor further comprises a domain comprising all or a portion of a uracil glycosylase inhibitor (UGI). In some embodiments, the base editor comprises a domain comprising all or a portion of a uracil binding protein (UBP), such as a uracil DNA glycosylase (UDG). In some embodiments, the base editor comprises a domain comprising all or a portion of a nucleic acid polymerase. In some embodiments, a nucleic acid polymerase or portion thereof incorporated into a base editor is a translesion DNA polymerase.

[0721] In some embodiments, a domain of the base editor can comprise multiple domains. For example, the base editor comprising a polynucleotide programmable nucleotide binding domain derived from Cas9 can comprise an REC lobe and an NUC lobe corresponding to the REC lobe and NUC lobe of a wild-type or natural Cas9. In another example, the base editor can comprise one or more of a RuvCI domain, BH domain, REC1 domain, REC2 domain, RuvCII domain, L1 domain, HNH domain, L2 domain, RuvCIII domain, WED domain, TOPO domain or CTD domain. In some embodiments, one or more domains of the base editor comprise a mutation (e.g., substitution, insertion, deletion) relative to a wild type version of a polypeptide comprising the domain. For example, an HNH domain of a polynucleotide programmable DNA binding domain can comprise an H840A substitution. In another example, a RuvCI domain of a polynucleotide programmable DNA binding domain can comprise a D10A substitution.

[0722] Different domains (e.g., adjacent domains) of the base editor disclosed herein can be connected to each other with or without the use of one or more linker domains (e.g., an XTEN linker domain). In some embodiments, a linker domain can be a bond (e.g., covalent bond), chemical group, or a molecule linking two molecules or moieties, e.g., two domains of a fusion protein, such as, for example, a first domain (e.g., Cas9-derived domain) and a second domain (e.g., an adenosine deaminase domain). In some embodiments, a linker is a covalent bond (e.g., a carbon-carbon bond, disulfide bond, carbon-hetero atom bond, etc.). In certain embodiments, a linker is a carbon nitrogen bond of an amide linkage. In certain embodiments, a linker is a cyclic or acyclic, substituted or unsubstituted, branched or unbranched aliphatic or heteroaliphatic linker. In certain embodiments, a linker is polymeric (e.g., polyethylene, polyethylene glycol, polyamide, polyester, etc.). In certain embodiments, a linker comprises a monomer, dimer, or polymer of aminoalkanoic acid. In some embodiments, a linker comprises an aminoalkanoic acid (e.g., glycine, ethanoic acid, alanine, beta-alanine, 3-aminopropanoic acid, 4-aminobutanoic acid, 5-pentanoic acid, etc.). In some embodiments, a linker comprises a monomer, dimer, or polymer of aminohexanoic acid (Ahx). In certain embodiments, a linker is based on a carbocyclic moiety (e.g., cyclopentane, cyclohexane). In other embodiments, a linker comprises a polyethylene glycol moiety (PEG). In certain embodiments, a linker comprises an aryl or heteroaryl moiety. In certain embodiments, the linker is based on a phenyl ring. A linker can include functionalized moieties to facilitate attachment of a nucleophile (e.g., thiol, amino) from the peptide to the linker. Any electrophile can be used as part of the linker. Exemplary electrophiles include, but are not limited to, activated esters, activated amides, Michael acceptors, alkyl halides, aryl halides, acyl halides, and isothiocyanates. In some embodiments, a linker joins a gRNA binding domain of an RNA-programmable nuclease, including a Cas9 nuclease domain, and the catalytic domain of a nucleic acid editing protein. In some embodiments, a linker joins a dCas9 and a second domain (e.g., UGI, cytidine deaminase, etc.).

[0723] Typically, a linker is positioned between, or flanked by, two groups, molecules, or other moieties and connected to each one via a covalent bond, thus connecting the two. In some embodiments, a linker is an amino acid or a plurality of amino acids (e.g., a peptide or protein). In some embodiments, a linker is an organic molecule, group, polymer, or chemical moiety. In some embodiments, a linker is 2-100 amino acids in length, for example, 2, 3, 4, 5, 6, 7, 8, 9, 10, 11, 12, 13, 14, 15, 16, 17, 18, 19, 20, 21, 22, 23, 24, 25, 26, 27, 28, 29, 30, 30-35, 35-40, 40-45, 45-50, 50-60, 60-70, 70-80, 80-90, 90-100, 100-150, or 150-200 amino acids in length. In some embodiments, the linker is about 3 to about 104 (e.g., 5, 6, 7, 8, 9, 10, 11, 12, 13, 14, 15, 16, 17, 18, 19, 20, 21, 22, 23, 24, 25, 26, 27, 28, 29, 30, 31, 32, 33, 34, 35, 36, 37, 38, 39, 40, 41, 42, 43, 44, 45, 46, 47, 48, 49, 50, 55, 60, 65, 70, 75, 80, 85, 90, 95, or 100) amino acids in length. Longer or shorter linkers are also contemplated. In some embodiments, a linker domain comprises the amino acid sequence SGSETPGTSESATPES, which can also be referred to as the XTEN linker. Any method for linking the fusion protein domains can be employed (e.g., ranging from very flexible linkers of the form (SGGS)n, (GGGS)n, (GGGGS)n, and (G)n, to more rigid linkers of the form (EAAAK)n, (GGS)n, SGSETPGTSESATPES (see, e.g., Guilinger J P, Thompson D B, Liu D R. Fusion of catalytically inactive Cas9 to FokI nuclease improves the specificity of genome modification. Nat. Biotechnol. 2014; 32(6): 577-82; the entire contents are incorporated herein by reference), or (XP)n motif, in order to achieve the optimal length for activity for the nucleobase editor. In some embodiments, n is 1, 2, 3, 4, 5, 6, 7, 8, 9, 10, 11, 12, 13, 14, or 15. In some embodiments, the linker comprises a (GGS)n motif, wherein n is 1, 3, or 7. In some embodiments, the Cas9 domain of the fusion proteins provided herein are fused via a linker comprising the amino acid sequence SGSETPGTSESATPES. In some embodiments, a linker comprises a plurality of proline residues and is 5-21, 5-14, 5-9, 5-7 amino acids in length, e.g., PAPAP, PAPAPA, PAPAPAP, PAPAPAPA, P(AP)4, P(AP)7, P(AP)10 (see, e.g., Tan J, Zhang F, Karcher D, Bock R. Engineering of high-precision base editors for site-specific single nucleotide replacement. Nat Commun. 2019 Jan. 25; 10(1):439; the entire contents are incorporated herein by reference). Such proline-rich linkers are also termed “rigid” linkers.

[0724] In another embodiment, the base editor system comprises a component (protein) that interacts non-covalently with a deaminase (DNA deaminase), e.g., an adenosine or a cytidine deaminase, and transiently attracts the adenosine or cytidine deaminase to the target nucleobase in a target polynucleotide sequence for specific editing, with minimal or reduced bystander or target-adjacent effects. Such a non-covalent system and method involving deaminase-interacting proteins serves to attract a DNA deaminase to a particular genomic target nucleobase and decouples the events of on-target and target-adjacent editing, thus enhancing the achievement of more precise single base substitution mutations. In an embodiment, the deaminase-interacting protein binds to the deaminase (e.g., adenosine deaminase or cytidine deaminase) without blocking or interfering with the active (catalytic) site of the deaminase from engaging the target nucleobase (e.g., adenosine or cytidine, respectively). Such as system, termed “MagnEdit,” involves interacting proteins tethered to a Cas9 and gRNA complex and can attract a co-expressed adenosine or cytidine deasminase (either exogenous or endogenous) to edit a specific genomic target site, is described in McCann, J. et al., 2020, “MagnEdit—interacting factors that recruit DNA-editing enzymes to single base targets,” Life-Science-Alliance, Vol. 3, No. 4 (e201900606), (doi 10.26508/Isa.201900606), the contents of which are incorporated by reference herein in their entirety. In an embodiment, the DNA deaminase is an ABE9 adenosine deaminase variant as described herein. In another embodiment, a system called “Suntag,” involves non-covalently interacting components used for recruiting protein (e.g., adenosine deaminase or cytidine deaminase) components, or multiple copies thereof, of base editors to polynucleotide target sites to achieve base editing at the site with reduced adjacent target editing, for example, as described in Tanenbaum, M. E. et al., “A protein tagging system for signal amplification in gene expression and fluorescence imaging,” Cell. 2014 Oct. 23; 159(3): 635-646. doi:10.1016/j.cell.2014.09.039; and in Huang, Y.-H. et al., 2017, “DNA epigenome editing using CRISPR-Cas SunTag-directed DNMT3A,” Genome Biol 18: 176. doi:10.1186/s13059-017-1306-z, the contents of each of which are incorporated by reference herein in their entirety. In an embodiment, the DNA deaminase is an ABE9 adenosine deaminase variant as described herein.

### Linkers

[0725] In certain embodiments, linkers may be used to link any of the peptides or peptide domains of the invention. The linker may be as simple as a covalent bond, or it may be a polymeric linker many atoms in length. In certain embodiments, the linker is a polypeptide or based on amino acids. In other embodiments, the linker is not peptide-like. In certain embodiments, the linker is a covalent bond (e.g., a carbon-carbon bond, disulfide bond, carbon-heteroatom bond, etc.). In certain embodiments, the linker is a carbon-nitrogen bond of an amide linkage. In certain embodiments, the linker is a cyclic or acyclic, substituted or unsubstituted, branched or unbranched aliphatic or heteroaliphatic linker. In certain embodiments, the linker is polymeric (e.g., polyethylene, polyethylene glycol, polyamide, polyester, etc.). In certain embodiments, the linker comprises a monomer, dimer, or polymer of aminoalkanoic acid. In certain embodiments, the linker comprises an aminoalkanoic acid (e.g., glycine, ethanoic acid, alanine, beta-alanine, 3-aminopropanoic acid, 4-aminobutanoic acid, 5-pentanoic acid, etc.). In certain embodiments, the linker comprises a monomer, dimer, or polymer of aminohexanoic acid (Ahx). In certain embodiments, the linker is based on a carbocyclic moiety (e.g., cyclopentane, cyclohexane). In other embodiments, the linker comprises a polyethylene glycol moiety (PEG). In other embodiments, the linker comprises amino acids. In certain embodiments, the linker comprises a peptide. In certain embodiments, the linker comprises an aryl or heteroaryl moiety. In certain embodiments, the linker is based on a phenyl ring. The linker may include functionalized moieties to facilitate attachment of a nucleophile (e.g., thiol, amino) from the peptide to the linker. Any electrophile may be used as part of the linker. Exemplary electrophiles include, but are not limited to, activated esters, activated amides, Michael acceptors, alkyl halides, aryl halides, acyl halides, and isothiocyanates.

[0726] In some embodiments, the linker is an amino acid or a plurality of amino acids (e.g., a peptide or protein). In some embodiments, the linker is a bond (e.g., a covalent bond), an organic molecule, group, polymer, or chemical moiety. In some embodiments, the linker is about 3 to about 104 (e.g., 5, 6, 7, 8, 9, 10, 11, 12, 13, 14, 15, 16, 17, 18, 19, 20, 21, 22, 23, 24, 25, 26, 27, 28, 29, 30, 31, 32, 33, 34, 35, 36, 37, 38, 39, 40, 41, 42, 43, 44, 45, 46, 47, 48, 49, 50, 55, 60, 65, 70, 75, 80, 85, 90, 95, or 100) amino acids in length.

[0727] In some embodiments, the adenosine deaminase and the napDNAbp are fused via a linker that is 4, 16, 32, or 104 amino acids in length. In some embodiments, the linker is about 3 to about 104 amino acids in length. In some embodiments, any of the fusion proteins provided herein, comprise an adenosine deaminase and a Cas9 domain that are fused to each other via a linker. Various linker lengths and flexibilities between the deaminase domain (e.g., an engineered ecTadA) and the Cas9 domain can be employed (e.g., ranging from very flexible linkers of the form (GGGS)ₙ, (GGGGS)ₙ, and (G)ₙ to more rigid linkers of the form (EAAAK)ₙ, (SGGS)ₙ, SGSETPGTSESATPES (see, e.g., Guilinger J P, Thompson D B, Liu D R. Fusion of catalytically inactive Cas9 to FokI nuclease improves the specificity of genome modification. Nat. Biotechnol. 2014; 32(6): 577-82; the entire contents are incorporated herein by reference) and (XP)ₙ) in order to achieve the optimal length for activity for the nucleobase editor. In some embodiments, n is 1, 2, 3, 4, 5, 6, 7, 8, 9, 10, 11, 12, 13, 14, or 15. In some embodiments, the linker comprises a (GGS)ₙ motif, wherein n is 1, 3, or 7. In some embodiments, the cytidine deaminase and adenosine deaminase and the Cas9 domain of any of the fusion proteins provided herein are fused via a linker (e.g., an XTEN linker) comprising the amino acid sequence SGSETPGTSESATPES.

[0728] In some embodiments, the target region comprises a target window, wherein the target window comprises the target nucleobase pair. In some embodiments, the target window comprises 1-10 nucleotides. In some embodiments, the target window is 1, 2, 3, 4, 5, 6, 7, 8, 9, 10, 11, 12, 13, 14, 15, 16, 17, 18, 19, or 20 nucleotides in length. In some embodiments, the intended edit of base pair is within the target window. In some embodiments, the target window comprises the intended edit of base pair. In some embodiments, the method is performed using any of the base editors provided herein. In some embodiments, a target window is a deamination window.

[0729] Additionally, in some cases, a Gam protein can be fused to an N terminus of a base editor. In some cases, a Gam protein can be fused to a C-terminus of a base editor. The Gam protein of bacteriophage Mu can bind to the ends of double strand breaks (DSBs) and protect them from degradation. In some embodiments, using Gam to bind the free ends of DSB can reduce indel formation during the process of base editing. In some embodiments, 174-residue Gam protein is fused to the N terminus of the base editors. See. Komor, A. C., et al., “Improved base excision repair inhibition and bacteriophage Mu Gam protein yields C:G-to-T:A base editors with higher efficiency and product purity” Science Advances 3:eaao4774 (2017). In some cases, a mutation or mutations can change the length of a base editor domain relative to a wild type domain. For example, a deletion of at least one amino acid in at least one domain can reduce the length of the base editor. In another case, a mutation or mutations do not change the length of a domain relative to a wild type domain. For example, substitution(s) in any domain does/do not change the length of the base editor.

[0730] In some embodiments, the base editing fusion proteins provided herein need to be positioned at a precise location, for example, where a target base is placed within a defined region (e.g., a “deamination window”). In some cases, a target can be within a 4 base region. In some cases, such a defined target region can be approximately 15 bases upstream of the PAM. See Komor, A. C., et al., “Programmable editing of a target base in genomic DNA without double-stranded DNA cleavage” Nature 533, 420-424 (2016); Gaudelli, N. M., et al., “Programmable base editing of A•T to G•C in genomic DNA without DNA cleavage” Nature 551, 464-471 (2017); and Komor, A. C., et al., “Improved base excision repair inhibition and bacteriophage Mu Gam protein yields C:G-to-T:A base editors with higher efficiency and product purity” Science Advances 3:eaao4774 (2017), the entire contents of which are hereby incorporated by reference.

[0731] A defined target region can be a deamination window. A deamination window can be the defined region in which a base editor acts upon and deaminates a target nucleotide. In some embodiments, the deamination window is within a 2, 3, 4, 5, 6, 7, 8, 9, or 10 base regions. In some embodiments, the deamination window is 5, 6, 7, 8, 9, 10, 11, 12, 13, 14, 15, 16, 17, 18, 19, 20, 21, 22, 23, 24, or 25 bases upstream of the PAM.

[0732] The base editors of the present disclosure can comprise any domain, feature or amino acid sequence which facilitates the editing of a target polynucleotide sequence. For example, in some embodiments, the base editor comprises a nuclear localization sequence (NLS). In some embodiments, an NLS of the base editor is localized between a deaminase domain and a polynucleotide programmable nucleotide binding domain. In some embodiments, an NLS of the base editor is localized C-terminal to a polynucleotide programmable nucleotide binding domain.

[0733] Other exemplary features that can be present in a base editor as disclosed herein are localization sequences, such as cytoplasmic localization sequences, export sequences, such as nuclear export sequences, or other localization sequences, as well as sequence tags that are useful for solubilization, purification, or detection of the fusion proteins. Suitable protein tags provided herein include, but are not limited to, biotin carboxylase carrier protein (BCCP) tags, myc-tags, calmodulin-tags, FLAG-tags, hemagglutinin (HA)-tags, polyhistidine tags, also referred to as histidine tags or His-tags, maltose binding protein (MBP)-tags, nus-tags, glutathione-S-transferase (GST)-tags, green fluorescent protein (GFP)-tags, thioredoxin-tags, S-tags, Softags (e.g., Softag 1, Softag 3), strep-tags, biotin ligase tags, FlAsH tags, V5 tags, and SBP-tags. Additional suitable sequences will be apparent to those of skill in the art. In some embodiments, the fusion protein comprises one or more His tags.

[0734] Non-limiting examples of protein domains which can be included in the fusion protein include deaminase domains (e.g., adenosine deaminase), a uracil glycosylase inhibitor (UGI) domain, epitope tags, and reporter gene sequences.

[0735] Non-limiting examples of epitope tags include histidine (His) tags, V5 tags, FLAG tags, influenza hemagglutinin (HA) tags, Myc tags, VSV-G tags, and thioredoxin (Trx) tags. Examples of reporter genes include, but are not limited to, glutathione-5-transferase (GST), horseradish peroxidase (HRP), chloramphenicol acetyltransferase (CAT) beta-galactosidase, beta-glucuronidase, luciferase, green fluorescent protein (GFP), HcRed, DsRed, cyan fluorescent protein (CFP), yellow fluorescent protein (YFP), and autofluorescent proteins including blue fluorescent protein (BFP). Additional protein sequences can include amino acid sequences that bind DNA molecules or bind other cellular molecules, including, but not limited to, maltose binding protein (MBP), S-tag, Lex A DNA binding domain (DBD) fusions, GAL4 DNA binding domain fusions, and herpes simplex virus (HSV) BP16 protein fusions.

### Methods of Using Fusion Proteins Comprising an Adenosine Deaminase or a Cytidine Deaminase and a Cas9 Domain

[0736] Some aspects of this disclosure provide methods of using the fusion proteins, or complexes provided herein. For example, some aspects of this disclosure provide methods comprising contacting a DNA molecule with any of the fusion proteins provided herein, and with at least one guide RNA, wherein the guide RNA is about 15-100 nucleotides long and comprises a sequence of at least 10 contiguous nucleotides that is complementary to a target sequence. In some embodiments, the 3′ end of the target sequence is immediately adjacent to a canonical PAM sequence (NGG). In some embodiments, the 3′ end of the target sequence is not immediately adjacent to a canonical PAM sequence (NGG). In some embodiments, the 3′ end of the target sequence is immediately adjacent to an AGC, GAG, TTT, GTG, or CAA sequence. In some embodiments, the 3′ end of the target sequence is immediately adjacent to an NGA, NGCG, NGN, NNGRRT, NNNRRT, NGCG, NGCN, NGTN, NGTN, NGTN, or 5′ (TTTV) sequence.

[0737] In some embodiments, a fusion protein of the invention is used for mutagenizing a target of interest. In particular, an adenosine deaminase nucleobase editor described herein (or a cytidine deaminase nucleobase editor) is capable of making multiple mutations within a target sequence. These mutations may affect the function of the target. For example, when an adenosine deaminase nucleobase editor is used to target a regulatory region the function of the regulatory region is altered and the expression of the downstream protein is reduced or eliminated.

[0738] It will be understood that the numbering of the specific positions or residues in the respective sequences depends on the particular protein and numbering scheme used. Numbering might be different, e.g., in precursors of a mature protein and the mature protein itself, and differences in sequences from species to species may affect numbering. One of skill in the art will be able to identify the respective residue in any homologous protein and in the respective encoding nucleic acid by methods well known in the art, e.g., by sequence alignment and determination of homologous residues.

[0739] It will be apparent to those of skill in the art that in order to target any of the fusion proteins comprising a Cas9 domain and an adenosine deaminase as disclosed herein (or a cytidine deaminase) to a target site, e.g., a site comprising a mutation to be edited, it is typically necessary to co-express the fusion protein together with a guide RNA, e.g., an sgRNA. As explained in more detail elsewhere herein, a guide RNA typically comprises a tracrRNA framework allowing for Cas9 binding, and a guide sequence, which confers sequence specificity to the Cas9:nucleic acid editing enzyme/domain fusion protein. Alternatively, the guide RNA and tracrRNA may be provided separately, as two nucleic acid molecules. In some embodiments, the guide RNA comprises a structure, wherein the guide sequence comprises a sequence that is complementary to the target sequence. The guide sequence is typically 20 nucleotides long. The sequences of suitable guide RNAs for targeting Cas9:nucleic acid editing enzyme/domain fusion proteins to specific genomic target sites will be apparent to those of skill in the art based on the instant disclosure. Such suitable guide RNA sequences typically comprise guide sequences that are complementary to a nucleic sequence within 50 nucleotides upstream or downstream of the target nucleotide to be edited. Some exemplary guide RNA sequences suitable for targeting any of the provided fusion proteins to specific target sequences are provided herein.

### Base Editor Efficiency

[0740] CRISPR-Cas9 nucleases have been widely used to mediate targeted genome editing. In most genome editing applications, Cas9 forms a complex with a guide polynucleotide (e.g., single guide RNA (sgRNA)) and induces a double-stranded DNA break (DSB) at the target site specified by the sgRNA sequence. Cells primarily respond to this DSB through the non-homologous end-joining (NHEJ) repair pathway, which results in stochastic insertions or deletions (indels) that can cause frameshift mutations that disrupt the gene. In the presence of a donor DNA template with a high degree of homology to the sequences flanking the DSB, gene correction can be achieved through an alternative pathway known as homology directed repair (HDR). Unfortunately, under most non-perturbative conditions, HDR is inefficient, dependent on cell state and cell type, and dominated by a larger frequency of indels. As most of the known genetic variations associated with human disease are point mutations, methods that can more efficiently and cleanly make precise point mutations are needed. Base editing systems as provided herein provide a new way to provide genome editing without generating double-strand DNA breaks, without requiring a donor DNA template, and without inducing an excess of stochastic insertions and deletions.

[0741] The base editors provided herein are capable of modifying a specific nucleotide base without generating a significant proportion of indels. The term “indel(s)”, as used herein, refers to the insertion or deletion of a nucleotide base within a nucleic acid. Such insertions or deletions can lead to frame shift mutations within a coding region of a gene. In some embodiments, it is desirable to generate base editors that efficiently modify (e.g., mutate or deaminate) a specific nucleotide within a nucleic acid, without generating a large number of insertions or deletions (i.e., indels) in the target nucleotide sequence. In certain embodiments, any of the base editors provided herein are capable of generating a greater proportion of intended modifications (e.g., point mutations or deaminations) versus indels.

[0742] In some embodiments, any of base editor systems provided herein result in less than 50%, less than 40%, less than 30%, less than 20%, less than 19%, less than 18%, less than 17%, less than 16%, less than 15%, less than 14%, less than 13%, less than 12%, less than 11%, less than 10%, less than 9%, less than 8%, less than 7%, less than 6%, less than 5%, less than 4%, less than 3%, less than 2%, less than 1%, less than 0.9%, less than 0.8%, less than 0.7%, less than 0.6%, less than 0.5%, less than 0.4%, less than 0.3%, less than 0.2%, less than 0.1%, less than 0.09%, less than 0.08%, less than 0.07%, less than 0.06%, less than 0.05%, less than 0.04%, less than 0.03%, less than 0.02%, or less than 0.01% indel formation in the target polynucleotide sequence.

[0743] In some embodiments, any of base editor systems comprising one of the ABE8 or ABE9 base editor variants described herein result in less than 50%, less than 40%, less than 30%, less than 20%, less than 19%, less than 18%, less than 17%, less than 16%, less than 15%, less than 14%, less than 13%, less than 12%, less than 11%, less than 10%, less than 9%, less than 8%, less than 7%, less than 6%, less than 5%, less than 4%, less than 3%, less than 2%, less than 1%, less than 0.9%, less than 0.8%, less than 0.7%, less than 0.6%, less than 0.5%, less than 0.4%, less than 0.3%, less than 0.2%, less than 0.1%, less than 0.09%, less than 0.08%, less than 0.07%, less than 0.06%, less than 0.05%, less than 0.04%, less than 0.03%, less than 0.02%, or less than 0.01% indel formation in the target polynucleotide sequence.

[0744] In some embodiments, any of base editor systems comprising one of the ABE8 or ABE9 base editor variants described herein result in less than 0.8% indel formation in the target polynucleotide sequence. In some embodiments, any of base editor systems comprising one of the ABE8 base editor variants described herein result in at most 0.8% indel formation in the target polynucleotide sequence. In some embodiments, any of base editor systems comprising one of the ABE8 or ABE9 base editor variants described herein result in less than 0.3% indel formation in the target polynucleotide sequence. In some embodiments, any of base editor systems comprising one of the ABE8 or ABE9 base editor variants described results in lower indel formation in the target polynucleotide sequence compared to a base editor system comprising one of ABE7 base editors. In some embodiments, any of base editor systems comprising one of the ABE8 or ABE9 base editor variants described herein results in lower indel formation in the target polynucleotide sequence compared to a base editor system comprising an ABE7.10.

[0745] In some embodiments, any of base editor systems comprising one of the ABE8 or ABE9 base editor variants described herein has reduction in indel frequency compared to a base editor system comprising one of the ABE7 base editors. In some embodiments, any of base editor systems comprising one of the ABE8 or ABE9 base editor variants described herein has at least 0.01%, at least 1%, at least 2%, at least 3%, at least 4%, at least 5%, at least 10%, at least 15%, at least 20%, at least 25%, at least 30%, at least 35%, at least 40%, at least 45%, at least 50%, at least 55%, at least 60%, at least 65%, at least 70%, at least 75%, at least 80%, at least 85%, at least 90%, or at least 95% reduction in indel frequency compared to a base editor system comprising one of the ABE7 base editors. In some embodiments, a base editor system comprising one of the ABE8 base editor variants described herein has at least 0.01%, at least 1%, at least 2%, at least 3%, at least 4%, at least 5%, at least 10%, at least 15%, at least 20%, at least 25%, at least 30%, at least 35%, at least 40%, at least 45%, at least 50%, at least 55%, at least 60%, at least 65%, at least 70%, at least 75%, at least 80%, at least 85%, at least 90%, or at least 95% reduction in indel frequency compared to a base editor system comprising an ABE7.10.

[0746] The disclosure provides adenosine deaminase variants (e.g., ABE8 or ABE9 variants) that have increased efficiency and specificity. In particular, the adenosine deaminase variants described herein are more likely to edit a desired base within a polynucleotide, and are less likely to edit bases that are not intended to be altered (e.g., “bystanders”).

[0747] In some embodiments, any of the base editing system comprising one of the ABE8 or ABE9 base editor variants described herein has reduced bystander editing or mutations. In some embodiments, an unintended editing or mutation is a bystander mutation or bystander editing, for example, base editing of a target base (e.g., A or C) in an unintended or non-target position in a target window of a target nucleotide sequence. In some embodiments, any of the base editing system comprising one of the ABE8 or ABE9 base editor variants described herein has reduced bystander editing or mutations compared to a base editor system comprising an ABE7 base editor, e.g., ABE7.10. In some embodiments, any of the base editing system comprising one of the ABE8 or ABE9 base editor variants described herein has reduced bystander editing or mutations by at least 1%, at least 2%, at least 3%, at least 4%, at least 5%, at least 10%, at least 15%, at least 20%, at least 25%, at least 30%, at least 35%, at least 40%, at least 45%, at least 50%, at least 55%, at least 60%, at least 65%, at least 70%, at least 75%, at least 80%, at least 85%, at least 90%, at least 95%, or at least 99% compared to a base editor system comprising an ABE7 base editor, e.g., ABE7.10. In some embodiments, any of the base editing system comprising one of the ABE8 or ABE9 base editor variants described herein has reduced bystander editing or mutations by at least 1.1 fold, at least 1.2 fold, at least 1.3 fold, at least 1.4 fold, at least 1.5 fold, at least 1.6 fold, at least 1.7 fold, at least 1.8 fold, at least 1.9 fold, at least 2.0 fold, at least 2.1 fold, at least 2.2 fold, at least 2.3 fold, at least 2.4 fold, at least 2.5 fold, at least 2.6 fold, at least 2.7 fold, at least 2.8 fold, at least 2.9 fold, or at least 3.0 fold compared to a base editor system comprising an ABE7 base editor, e.g., ABE7.10.

[0748] In some embodiments, any of the base editing system comprising one of the ABE8 or ABE9 base editor variants described herein has reduced spurious editing. In some embodiments, an unintended editing or mutation is a spurious mutation or spurious editing, for example, non-specific editing or guide independent editing of a target base (e.g., A or C) in an unintended or non-target region of the genome. In some embodiments, any of the base editing system comprising one of the ABE8 or ABE9 base editor variants described herein has reduced spurious editing compared to a base editor system comprising an ABE7 base editor, e.g., ABE7.10. In some embodiments, any of the base editing system comprising one of the ABE8 or ABE9 base editor variants described herein has reduced spurious editing by at least 1%, at least 2%, at least 3%, at least 4%, at least 5%, at least 10%, at least 15%, at least 20%, at least 25%, at least 30%, at least 35%, at least 40%, at least 45%, at least 50%, at least 55%, at least 60%, at least 65%, at least 70%, at least 75%, at least 80%, at least 85%, at least 90%, at least 95%, or at least 99% compared to a base editor system comprising an ABE7 base editor, e.g., ABE7.10. In some embodiments, any of the base editing system comprising one of the ABE8 or ABE9 base editor variants described herein has reduced spurious editing by at least 1.1 fold, at least 1.2 fold, at least 1.3 fold, at least 1.4 fold, at least 1.5 fold, at least 1.6 fold, at least 1.7 fold, at least 1.8 fold, at least 1.9 fold, at least 2.0 fold, at least 2.1 fold, at least 2.2 fold, at least 2.3 fold, at least 2.4 fold, at least 2.5 fold, at least 2.6 fold, at least 2.7 fold, at least 2.8 fold, at least 2.9 fold, or at least 3.0 fold compared to a base editor system comprising an ABE7 base editor, e.g., ABE7.10.

[0749] Some aspects of the disclosure are based on the recognition that any of the base editors provided herein are capable of efficiently generating an intended mutation, such as a point mutation, in a nucleic acid (e.g., a nucleic acid within a genome of a subject) without generating a significant number of unintended mutations, such as unintended point mutations (i.e., mutation of bystanders). In some embodiments, any of the base editors provided herein are capable of generating at least 0.01% of intended mutations (i.e. at least 0.01% base editing efficiency). In some embodiments, any of the base editors provided herein are capable of generating at least 0.01%, 1%, 2%, 3%, 4%, 5%, 10%, 15%, 20%, 25%, 30%, 40%, 45%, 50%, 60%, 70%, 80%, 90%, 95%, or 99% of intended mutations.

[0750] In some embodiments, any of the ABE8 or ABE9 base editor variants described herein have at least 0.01%, at least 1%, at least 2%, at least 3%, at least 4%, at least 5%, at least 10%, at least 15%, at least 20%, at least 25%, at least 30%, at least 35%, at least 40%, at least 45%, at least 50%, at least 55%, at least 60%, at least 65%, at least 70%, at least 75%, at least 80%, at least 85%, at least 90%, at least 95%, or at least 99% base editing efficiency. In some embodiments, the base editing efficiency may be measured by calculating the percentage of edited nucleobases in a population of cells. In some embodiments, any of the ABE8 or ABE9 base editor variants described herein have base editing efficiency of at least 0.01%, at least 1%, at least 2%, at least 3%, at least 4%, at least 5%, at least 10%, at least 15%, at least 20%, at least 25%, at least 30%, at least 35%, at least 40%, at least 45%, at least 50%, at least 55%, at least 60%, at least 65%, at least 70%, at least 75%, at least 80%, at least 85%, at least 90%, at least 95%, or at least 99% as measured by edited nucleobases in a population of cells.

[0751] In some embodiments, any of the ABE8 or ABE9 base editor variants described herein has higher base editing efficiency compared to the ABET base editors. In some embodiments, any of the ABE8 or ABE9 base editor variants described herein have at least 1%, at least 2%, at least 3%, at least 4%, at least 5%, at least 10%, at least 15%, at least 20%, at least 25%, at least 30%, at least 35%, at least 40%, at least 45%, at least 50%, at least 55%, at least 60%, at least 65%, at least 70%, at least 75%, at least 80%, at least 85%, at least 90%, at least 95%, at least 99%, at least 100%, at least 105%, at least 110%, at least 115%, at least 120%, at least 125%, at least 130%, at least 135%, at least 140%, at least 145%, at least 150%, at least 155%, at least 160%, at least 165%, at least 170%, at least 175%, at least 180%, at least 185%, at least 190%, at least 195%, at least 200%, at least 210%, at least 220%, at least 230%, at least 240%, at least 250%, at least 260%, at least 270%, at least 280%, at least 290%, at least 300%, at least 310%, at least 320%, at least 330%, at least 340%, at least 350%, at least 360%, at least 370%, at least 380%, at least 390%, at least 400%, at least 450%, or at least 500% higher base editing efficiency compared to an ABE7 base editor, e.g., ABE7.10.

[0752] In some embodiments, any of the ABE8 or ABE9 base editor variants described herein has at least 1.1 fold, at least 1.2 fold, at least 1.3 fold, at least 1.4 fold, at least 1.5 fold, at least 1.6 fold, at least 1.7 fold, at least 1.8 fold, at least 1.9 fold, at least 2.0 fold, at least 2.1 fold, at least 2.2 fold, at least 2.3 fold, at least 2.4 fold, at least 2.5 fold, at least 2.6 fold, at least 2.7 fold, at least 2.8 fold, at least 2.9 fold, at least 3.0 fold, at least 3.1 fold, at least 3.2, at least 3.3 fold, at least 3.4 fold, at least 3.5 fold, at least 3.6 fold, at least 3.7 fold, at least 3.8 fold, at least 3.9 fold, at least 4.0 fold, at least 4.1 fold, at least 4.2 fold, at least 4.3 fold, at least 4.4 fold, at least 4.5 fold, at least 4.6 fold, at least 4.7 fold, at least 4.8 fold, at least 4.9 fold, or at least 5.0 fold higher base editing efficiency compared to an ABE7 base editor, e.g., ABE7.10.

[0753] In some embodiments, any of the ABE8 or ABE9 base editor variants described herein have at least 0.01%, at least 1%, at least 2%, at least 3%, at least 4%, at least 5%, at least 10%, at least 15%, at least 20%, at least 25%, at least 30%, at least 35%, at least 40%, at least 45%, at least 50%, at least 55%, at least 60%, at least 65%, at least 70%, at least 75%, at least 80%, at least 85%, at least 90%, at least 95%, or at least 99% on-target base editing efficiency. In some embodiments, any of the ABE8 or ABE9 base editor variants described herein have on-target base editing efficiency of at least 0.01%, at least 1%, at least 2%, at least 3%, at least 4%, at least 5%, at least 10%, at least 15%, at least 20%, at least 25%, at least 30%, at least 35%, at least 40%, at least 45%, at least 50%, at least 55%, at least 60%, at least 65%, at least 70%, at least 75%, at least 80%, at least 85%, at least 90%, at least 95%, or at least 99% as measured by edited target nucleobases in a population of cells.

[0754] In some embodiments, any of the ABE8 or ABE9 base editor variants described herein has higher on-target base editing efficiency compared to the ABE7 base editors. In some embodiments, any of the ABE8 or ABE9 base editor variants described herein have at least 1%, at least 2%, at least 3%, at least 4%, at least 5%, at least 10%, at least 15%, at least 20%, at least 25%, at least 30%, at least 35%, at least 40%, at least 45%, at least 50%, at least 55%, at least 60%, at least 65%, at least 70%, at least 75%, at least 80%, at least 85%, at least 90%, at least 95%, at least 99%, at least 100%, at least 105%, at least 110%, at least 115%, at least 120%, at least 125%, at least 130%, at least 135%, at least 140%, at least 145%, at least 150%, at least 155%, at least 160%, at least 165%, at least 170%, at least 175%, at least 180%, at least 185%, at least 190%, at least 195%, at least 200%, at least 210%, at least 220%, at least 230%, at least 240%, at least 250%, at least 260%, at least 270%, at least 280%, at least 290%, at least 300%, at least 310%, at least 320%, at least 330%, at least 340%, at least 350%, at least 360%, at least 370%, at least 380%, at least 390%, at least 400%, at least 450%, or at least 500% higher on-target base editing efficiency compared to an ABE7 base editor, e.g., ABE7.10.

[0755] In some embodiments, any of the ABE8 or ABE9 base editor variants described herein has at least 1.1 fold, at least 1.2 fold, at least 1.3 fold, at least 1.4 fold, at least 1.5 fold, at least 1.6 fold, at least 1.7 fold, at least 1.8 fold, at least 1.9 fold, at least 2.0 fold, at least 2.1 fold, at least 2.2 fold, at least 2.3 fold, at least 2.4 fold, at least 2.5 fold, at least 2.6 fold, at least 2.7 fold, at least 2.8 fold, at least 2.9 fold, at least 3.0 fold, at least 3.1 fold, at least 3.2 fold, at least 3.3 fold, at least 3.4 fold, at least 3.5 fold, at least 3.6 fold, at least 3.7 fold, at least 3.8 fold, at least 3.9 fold, at least 4.0 fold, at least 4.1 fold, at least 4.2 fold, at least 4.3 fold, at least 4.4 fold, at least 4.5 fold, at least 4.6 fold, at least 4.7 fold, at least 4.8 fold, at least 4.9 fold, or at least 5.0 fold higher on-target base editing efficiency compared to an ABE7 base editor, e.g., ABE7.10.

[0756] The ABE8 or ABE9 base editor variants described herein may be delivered to a host cell via a plasmid, a vector, a LNP complex, or an mRNA. In some embodiments, any of the ABE8 or ABE9 base editor variants described herein is delivered to a host cell as an mRNA. In some embodiments, an ABE8 or ABE9 base editor delivered via a nucleic acid based delivery system, e.g., an mRNA, has on-target editing efficiency of at least at least 1%, at least 2%, at least 3%, at least 4%, at least 5%, at least 10%, at least 15%, at least 20%, at least 25%, at least 30%, at least 35%, at least 40%, at least 45%, at least 50%, at least 55%, at least 60%, at least 65%, at least 70%, at least 75%, at least 80%, at least 85%, at least 90%, at least 95%, or at least 99% as measured by edited nucleobases. In some embodiments, an ABE8 or ABE9 base editor delivered by an mRNA system has higher base editing efficiency compared to an ABE8 or ABE9 base editor delivered by a plasmid or vector system. In some embodiments, any of the ABE8 or ABE9 base editor variants described herein has at least 1%, at least 2%, at least 3%, at least 4%, at least 5%, at least 10%, at least 15%, at least 20%, at least 25%, at least 30%, at least 35%, at least 40%, at least 45%, at least 50%, at least 55%, at least 60%, at least 65%, at least 70%, at least 75%, at least 80%, at least 85%, at least 90%, at least 95%, at least 99%, at least 100%, at least 105%, at least 110%, at least 115%, at least 120%, at least 125%, at least 130%, at least 135%, at least 140%, at least 145%, at least 150%, at least 155%, at least 160%, at least 165%, at least 170%, at least 175%, at least 180%, at least 185%, at least 190%, at least 195%, at least 200%, at least 210%, at least 220%, at least 230%, at least 240%, at least 250%, at least 260%, at least 270%, at least 280%, at least 290%, at least 300% higher, at least 310%, at least 320%, at least 330%, at least 340%, at least 350%, at least 360%, at least 370%, at least 380%, at least 390%, at least 400%, at least 450%, or at least 500% on-target editing efficiency when delivered by an mRNA system compared to when delivered by a plasmid or vector system. In some embodiments, any of the ABE8 or ABE9 base editor variants described herein has at least 1.1 fold, at least 1.2 fold, at least 1.3 fold, at least 1.4 fold, at least 1.5 fold, at least 1.6 fold, at least 1.7 fold, at least 1.8 fold, at least 1.9 fold, at least 2.0 fold, at least 2.1 fold, at least 2.2 fold, at least 2.3 fold, at least 2.4 fold, at least 2.5 fold, at least 2.6 fold, at least 2.7 fold, at least 2.8 fold, at least 2.9 fold, at least 3.0 fold, at least 3.1 fold, at least 3.2 fold, at least 3.3 fold, at least 3.4 fold, at least 3.5 fold, at least 3.6 fold, at least 3.7 fold, at least 3.8 fold, at least 3.9 fold, at least 4.0 fold, at least 4.1 fold, at least 4.2 fold, at least 4.3 fold, at least 4.4 fold, at least 4.5 fold, at least 4.6 fold, at least 4.7 fold, at least 4.8 fold, at least 4.9 fold, or at least 5.0 fold higher on-target editing efficiency when delivered by an mRNA system compared to when delivered by a plasmid or vector system.

[0757] In some embodiments, any of base editor systems comprising one of the ABE8 or ABE9 base editor variants described herein result in less than 50%, less than 40%, less than 30%, less than 20%, less than 19%, less than 18%, less than 17%, less than 16%, less than 15%, less than 14%, less than 13%, less than 12%, less than 11%, less than 10%, less than 9%, less than 8%, less than 7%, less than 6%, less than 5%, less than 4%, less than 3%, less than 2%, less than 1%, less than 0.9%, less than 0.8%, less than 0.7%, less than 0.6%, less than 0.5%, less than 0.4%, less than 0.3%, less than 0.2%, less than 0.1%, less than 0.09%, less than 0.08%, less than 0.07%, less than 0.06%, less than 0.05%, less than 0.04%, less than 0.03%, less than 0.02%, or less than 0.01% off-target editing in the target polynucleotide sequence.

[0758] In some embodiments, any of the ABE8 or ABE9 base editor variants described herein has lower guided off-target editing efficiency when delivered by an mRNA system compared to when delivered by a plasmid or vector system. In some embodiments, any of the ABE8 or ABE9 base editor variants described herein has at least 1%, at least 2%, at least 3%, at least 4%, at least 5%, at least 10%, at least 15%, at least 20%, at least 25%, at least 30%, at least 35%, at least 40%, at least 45%, at least 50%, at least 55%, at least 60%, at least 65%, at least 70%, at least 75%, at least 80%, at least 85%, at least 90%, at least 95%, or at least 99% lower guided off-target editing efficiency when delivered by an mRNA system compared to when delivered by a plasmid or vector system. In some embodiments, any of the ABE8 or ABE9 base editor variants described herein has at least 1.1 fold, at least 1.2 fold, at least 1.3 fold, at least 1.4 fold, at least 1.5 fold, at least 1.6 fold, at least 1.7 fold, at least 1.8 fold, at least 1.9 fold, at least 2.0 fold, at least 2.1 fold, at least 2.2 fold, at least 2.3 fold, at least 2.4 fold, at least 2.5 fold, at least 2.6 fold, at least 2.7 fold, at least 2.8 fold, at least 2.9 fold, or at least 3.0 fold lower guided off-target editing efficiency when delivered by an mRNA system compared to when delivered by a plasmid or vector system. In some embodiments, any of the ABE8 or ABE9 base editor variants described herein has at least about 2.2 fold decrease in guided off-target editing efficiency when delivered by an mRNA system compared to when delivered by a plasmid or vector system.

[0759] In some embodiments, any of the ABE8 or ABE9 base editor variants described herein has lower guide-independent off-target editing efficiency when delivered by an mRNA system compared to when delivered by a plasmid or vector system. In some embodiments, any of the ABE8 or ABE9 base editor variants described herein has at least 1%, at least 2%, at least 3%, at least 4%, at least 5%, at least 10%, at least 15%, at least 20%, at least 25%, at least 30%, at least 35%, at least 40%, at least 45%, at least 50%, at least 55%, at least 60%, at least 65%, at least 70%, at least 75%, at least 80%, at least 85%, at least 90%, at least 95%, or at least 99% lower guide-independent off-target editing efficiency when delivered by an mRNA system compared to when delivered by a plasmid or vector system. In some embodiments, any of the ABE8 or ABE9 base editor variants described herein has at least 1.1 fold, at least 1.2 fold, at least 1.3 fold, at least 1.4 fold, at least 1.5 fold, at least 1.6 fold, at least 1.7 fold, at least 1.8 fold, at least 1.9 fold, at least 2.0 fold, at least 2.1 fold, at least 2.2 fold, at least 2.3 fold, at least 2.4 fold, at least 2.5 fold, at least 2.6 fold, at least 2.7 fold, at least 2.8 fold, at least 2.9 fold, at least 3.0 fold, at least 5.0 fold, at least 10.0 fold, at least 20.0 fold, at least 50.0 fold, at least 70.0 fold, at least 100.0 fold, at least 120.0 fold, at least 130.0 fold, or at least 150.0 fold lower guide-independent off-target editing efficiency when delivered by an mRNA system compared to when delivered by a plasmid or vector system. In some embodiments, an ABE8 or ABE9 base editor variant described herein has 134.0 fold decrease in guide-independent off-target editing efficiency (e.g., spurious RNA deamination) when delivered by an mRNA system compared to when delivered by a plasmid or vector system. In some embodiments, an ABE8 or ABE9 base editor variant described herein does not increase guide-independent mutation rates across the genome.

[0760] Some aspects of the disclosure are based on the recognition that any of the base editors provided herein are capable of efficiently generating an intended mutation, such as a point mutation, in a nucleic acid (e.g., a nucleic acid within a genome of a subject) without generating a significant number of unintended mutations, such as unintended point mutations. In some embodiments, any of the base editors provided herein are capable of generating at least 0.01% of intended mutations (e.g., spurious off-target editing or bystander editing). In some embodiments, an intended mutation is a mutation that is generated by a specific base editor bound to a gRNA, specifically designed to alter or correct a mutation in a target gene. Some aspects of the disclosure are based on the recognition that any of the base editors provided herein are capable of efficiently generating an intended mutation in a nucleic acid (e.g. a nucleic acid within a genome of a subject) without generating a significant number of unintended mutations. In some embodiments, an intended mutation is a mutation that is generated by a specific base editor bound to a gRNA, specifically designed to alter or correct an intended mutation. In some embodiments, the intended mutation is a mutation that generates a stop codon, for example, a premature stop codon within the coding region of a gene. In some embodiments, the intended mutation is a mutation that eliminates a stop codon. In some embodiments, the intended mutation is a mutation that alters the splicing of a gene. In some embodiments, the intended mutation is a mutation that alters the regulatory sequence of a gene (e.g., a gene promotor or gene repressor).

[0761] In some embodiments, the base editors provided herein are capable of generating a ratio of intended point mutations to indels that is greater than 1:1. In some embodiments, the base editors provided herein are capable of generating a ratio of intended point mutations to indels that is at least 1.5:1, at least 2:1, at least 2.5:1, at least 3:1, at least 3.5:1, at least 4:1, at least 4.5:1, at least 5:1, at least 5.5:1, at least 6:1, at least 6.5:1, at least 7:1, at least 7.5:1, at least 8:1, at least 8.5:1, at least 9:1, at least 10:1, at least 11:1, at least 12:1, at least 13:1, at least 14:1, at least 15:1, at least 20:1, at least 25:1, at least 30:1, at least 40:1, at least 50:1, at least 100:1, at least 200:1, at least 300:1, at least 400:1, at least 500:1, at least 600:1, at least 700:1, at least 800:1, at least 900:1, or at least 1000:1, or more.

[0762] The number of intended mutations and indels can be determined using any suitable method, for example, as described in International PCT Application Nos. PCT/2017/045381 (WO2018/027078) and PCT/US2016/058344 (WO2017/070632); Komor, A. C., et al., “Programmable editing of a target base in genomic DNA without double-stranded DNA cleavage” Nature 533, 420-424 (2016); Gaudelli, N. M., et al., “Programmable base editing of A•T to G•C in genomic DNA without DNA cleavage” Nature 551, 464-471 (2017); and Komor, A. C., et al., “Improved base excision repair inhibition and bacteriophage Mu Gam protein yields C:G-to-T:A base editors with higher efficiency and product purity” Science Advances 3:eaao4774 (2017); the entire contents of which are hereby incorporated by reference.

[0763] In some embodiments, to calculate indel frequencies, sequencing reads are scanned for exact matches to two 10-bp sequences that flank both sides of a window in which indels can occur. If no exact matches are located, the read is excluded from analysis. If the length of this indel window exactly matches the reference sequence the read is classified as not containing an indel. If the indel window is two or more bases longer or shorter than the reference sequence, then the sequencing read is classified as an insertion or deletion, respectively. In some embodiments, the base editors provided herein can limit formation of indels in a region of a nucleic acid. In some embodiments, the region is at a nucleotide targeted by a base editor or a region within 2, 3, 4, 5, 6, 7, 8, 9, or 10 nucleotides of a nucleotide targeted by a base editor.

[0764] The number of indels formed at a target nucleotide region can depend on the amount of time a nucleic acid (e.g., a nucleic acid within the genome of a cell) is exposed to a base editor. In some embodiments, the number or proportion of indels is determined after at least 1 hour, at least 2 hours, at least 6 hours, at least 12 hours, at least 24 hours, at least 36 hours, at least 48 hours, at least 3 days, at least 4 days, at least 5 days, at least 7 days, at least 10 days, or at least 14 days of exposing the target nucleotide sequence (e.g., a nucleic acid within the genome of a cell) to a base editor. It should be appreciated that the characteristics of the base editors as described herein can be applied to any of the fusion proteins, or methods of using the fusion proteins provided herein.

[0765] In some embodiments, the base editors provided herein are capable of limiting formation of indels in a region of a nucleic acid. In some embodiments, the region is at a nucleotide targeted by a base editor or a region within 2, 3, 4, 5, 6, 7, 8, 9, or 10 nucleotides of a nucleotide targeted by a base editor. In some embodiments, any of the base editors provided herein are capable of limiting the formation of indels at a region of a nucleic acid to less than 1%, less than 1.5%, less than 2%, less than 2.5%, less than 3%, less than 3.5%, less than 4%, less than 4.5%, less than 5%, less than 6%, less than 7%, less than 8%, less than 9%, less than 10%, less than 12%, less than 15%, or less than 20%. The number of indels formed at a nucleic acid region may depend on the amount of time a nucleic acid (e.g., a nucleic acid within the genome of a cell) is exposed to a base editor. In some embodiments, any number or proportion of indels is determined after at least 1 hour, at least 2 hours, at least 6 hours, at least 12 hours, at least 24 hours, at least 36 hours, at least 48 hours, at least 3 days, at least 4 days, at least 5 days, at least 7 days, at least 10 days, or at least 14 days of exposing a nucleic acid (e.g., a nucleic acid within the genome of a cell) to a base editor.

[0766] Details of base editor efficiency are described in International PCT Application Nos. PCT/2017/045381 (WO 2018/027078) and PCT/US2016/058344 (WO 2017/070632), each of which is incorporated herein by reference in its entirety. Also see Komor, A. C., et al., “Programmable editing of a target base in genomic DNA without double-stranded DNA cleavage” Nature 533, 420-424 (2016); Gaudelli, N. M., et al., “Programmable base editing of A•T to G•C in genomic DNA without DNA cleavage” Nature 551, 464-471 (2017); and Komor, A. C., et al., “Improved base excision repair inhibition and bacteriophage Mu Gam protein yields C:G-to-T:A base editors with higher efficiency and product purity” Science Advances 3:eaao4774 (2017), the entire contents of which are hereby incorporated by reference. In some embodiments, editing of a plurality of nucleobase pairs in one or more genes using the methods provided herein results in formation of at least one intended mutation. In some embodiments, said formation of said at least one intended mutation results in the disruption the normal function of a gene. In some embodiments, said formation of said at least one intended mutation results decreases or eliminates the expression of a protein encoded by a gene. It should be appreciated that multiplex editing can be accomplished using any method or combination of methods provided herein.

### Multiplex Editing

[0767] In some embodiments, the base editor system provided herein is capable of multiplex editing of a plurality of nucleobase pairs in one or more genes. In some embodiments, the plurality of nucleobase pairs is located in the same gene. In some embodiments, the plurality of nucleobase pairs is located in one or more gene, wherein at least one gene is located in a different locus. In some embodiments, the multiplex editing can comprise one or more guide polynucleotides. In some embodiments, the multiplex editing can comprise one or more base editor system. In some embodiments, the multiplex editing can comprise one or more base editor systems with a single guide polynucleotide. In some embodiments, the multiplex editing can comprise one or more base editor system with a plurality of guide polynucleotides. In some embodiments, the multiplex editing can comprise one or more guide polynucleotide with a single base editor system. In some embodiments, the multiplex editing can comprise at least one guide polynucleotide that does not require a PAM sequence to target binding to a target polynucleotide sequence. In some embodiments, the multiplex editing can comprise at least one guide polynucleotide that requires a PAM sequence to target binding to a target polynucleotide sequence. In some embodiments, the multiplex editing can comprise a mix of at least one guide polynucleotide that does not require a PAM sequence to target binding to a target polynucleotide sequence and at least one guide polynucleotide that require a PAM sequence to target binding to a target polynucleotide sequence. It should be appreciated that the characteristics of the multiplex editing using any of the base editors as described herein can be applied to any of combination of the methods of using any of the base editor provided herein. It should also be appreciated that the multiplex editing using any of the base editors as described herein can comprise a sequential editing of a plurality of nucleobase pairs.

[0768] In some embodiments, the plurality of nucleobase pairs are in one more genes. In some embodiments, the plurality of nucleobase pairs is in the same gene. In some embodiments, at least one gene in the one more genes is located in a different locus.

[0769] In some embodiments, the editing is editing of the plurality of nucleobase pairs in at least one protein coding region. In some embodiments, the editing is editing of the plurality of nucleobase pairs in at least one protein non-coding region. In some embodiments, the editing is editing of the plurality of nucleobase pairs in at least one protein coding region and at least one protein non-coding region.

[0770] In some embodiments, the editing is in conjunction with one or more guide polynucleotides. In some embodiments, the base editor system can comprise one or more base editor system. In some embodiments, the base editor system can comprise one or more base editor systems in conjunction with a single guide polynucleotide. In some embodiments, the base editor system can comprise one or more base editor system in conjunction with a plurality of guide polynucleotides. In some embodiments, the editing is in conjunction with one or more guide polynucleotide with a single base editor system. In some embodiments, the editing is in conjunction with at least one guide polynucleotide that does not require a PAM sequence to target binding to a target polynucleotide sequence. In some embodiments, the editing is in conjunction with at least one guide polynucleotide that require a PAM sequence to target binding to a target polynucleotide sequence. In some embodiments, the editing is in conjunction with a mix of at least one guide polynucleotide that does not require a PAM sequence to target binding to a target polynucleotide sequence and at least one guide polynucleotide that require a PAM sequence to target binding to a target polynucleotide sequence. It should be appreciated that the characteristics of the multiplex editing using any of the base editors as described herein can be applied to any of combination of the methods of using any of the base editors provided herein. It should also be appreciated that the editing can comprise a sequential editing of a plurality of nucleobase pairs.

### Methods of Using Base Editors

[0771] Base editing of genes and alleles provides new and beneficial strategies for therapeutics and basic research.

[0772] The present disclosure provides methods for the treatment of a subject diagnosed with a disease associated with or caused by a point mutation that can be corrected by a base editor or base editor system provided herein. For example, in some embodiments, a method is provided that comprises administering to a subject having such a disease, e.g., a disease caused by a genetic mutation, e.g., a single nucleotide polymorphism (SNP), an effective amount of a nucleobase editor (e.g., an adenosine deaminase base editor) that corrects the point mutation in the disease associated gene. In a certain aspect, methods are provided for the treatment of a disease, which is associated or caused by a mutation. In an embodiment, the disease is alpha-1 antitrypsin deficiency (A1AD), which is associated with a mutation in the SERPINA1 gene. In an embodiment, the pathogenic mutation associated with A1AD is E342K, e.g., as described in Example 3 herein.

[0773] It will be understood that the numbering of the specific positions or residues in the respective sequences, e.g., polynucleotide or amino acid sequences of a disease-related gene or its encoded protein, respectively, depends on the particular protein and numbering scheme used. Numbering can be different, e.g., in precursors of a mature protein and the mature protein itself, and differences in sequences from species to species can affect numbering. One of skill in the art will be able to identify the respective residue in any homologous protein and in the respective encoding nucleic acid by methods well known in the art, e.g., by sequence alignment and determination of homologous residues.

[0774] Provided herein are methods of using the base editor or base editor system for editing a nucleobase in a target nucleotide sequence associated with a disease or disorder. In some embodiments, the activity of the base editor (e.g., comprising an adenosine deaminase and a Cas9 domain) results in a correction of a point mutation. In an embodiment, the activity of the base editor results in the correction of a mutation that alters a splice acceptor or donor site. In some embodiments, the target DNA sequence comprises a G→A point mutation associated with a disease or disorder, and wherein the deamination of the mutant A base results in a sequence that is not associated with a disease or disorder.

[0775] In some embodiments, the target DNA sequence encodes a protein, and the point mutation is in a codon and results in a change in the amino acid encoded by the mutant codon as compared to the wild-type codon. In some embodiments, the deamination of the mutant A results in a change of the amino acid encoded by the mutant codon. In some embodiments, the deamination of the mutant A results in the codon encoding the wild-type amino acid. In some embodiments, the subject has or has been diagnosed with a disease or disorder.

[0776] In some embodiments, the adenosine deaminases provided herein are capable of deaminating adenine of a deoxyadenosine residue of DNA. Other aspects of the disclosure provide fusion proteins that comprise an adenosine deaminase (e.g., an adenosine deaminase that deaminates deoxyadenosine in DNA as described herein) and a domain (e.g., a Cas9 or a Cpf1 protein) capable of binding to a specific nucleotide sequence. For example, the adenosine can be converted to an inosine residue, which typically base pairs with a cytosine residue. Such fusion proteins are useful inter alia for targeted editing of nucleic acid sequences. Such fusion proteins can be used for targeted editing of DNA in vitro, e.g., for the generation of mutant cells or animals; for the introduction of targeted mutations, e.g., for the correction of genetic defects in cells ex vivo, e.g., in cells obtained from a subject that are subsequently re-introduced into the same or another subject; and for the introduction of targeted mutations in vivo. The present disclosure provides deaminases, fusion proteins, nucleic acids, vectors, cells, compositions, methods, kits, systems, etc. that utilize the deaminases and nucleobase editors.

### Generating an Intended Mutation

[0777] In some embodiments, the purpose of the methods provided herein is to restore the function of a dysfunctional gene via gene editing. In some embodiments, the function of a dysfunctional gene is restored by introducing an intended mutation. The nucleobase editing proteins provided herein can be validated for gene editing-based human therapeutics in vitro, e.g., by correcting a disease-associated mutation in human cell culture. It will be understood by the skilled artisan that the nucleobase editing proteins provided herein, e.g., the fusion proteins comprising a polynucleotide programmable nucleotide binding domain (e.g., Cas9) and a nucleobase editing domain (e.g., an adenosine deaminase domain can be used to correct any single point A to G or C to T mutation. In the first case, deamination of the mutant A to I corrects the mutation, and in the latter case, deamination of the A that is base-paired with the mutant T, followed by a round of replication, corrects the mutation.

[0778] In some embodiments, the present disclosure provides base editors that can efficiently generate an intended mutation, such as a point mutation, in a nucleic acid (e.g., a nucleic acid within a genome of a subject) without generating a significant number of unintended mutations, such as unintended point mutations. In some embodiments, an intended mutation is a mutation that is generated by a specific base editor (e.g., adenosine base editor) bound to a guide polynucleotide (e.g., gRNA), specifically designed to generate the intended mutation. In some embodiments, the intended mutation is a mutation associated with a disease or disorder. In some embodiments, the intended mutation is an adenine (A) to guanine (G) point mutation associated with a disease or disorder. In some embodiments, the intended mutation is a cytosine (C) to thymine (T) point mutation associated with a disease or disorder. In some embodiments, the intended mutation is an adenine (A) to guanine (G) point mutation within the coding region or non-coding region of a gene. In some embodiments, the intended mutation is a cytosine (C) to thymine (T) point mutation within the coding region or non-coding region of a gene. In some embodiments, the intended mutation is a point mutation that generates a stop codon, for example, a premature stop codon within the coding region of a gene. In some embodiments, the intended mutation is a mutation that eliminates a stop codon.

[0779] In some embodiments, any of the base editors provided herein are capable of generating a ratio of intended mutations to unintended mutations (e.g., intended point mutations:unintended point mutations) that is greater than 1:1. In some embodiments, any of the base editors provided herein are capable of generating a ratio of intended mutations to unintended mutations (e.g., intended point mutations:unintended point mutations) that is at least 1.5:1, at least 2:1, at least 2.5:1, at least 3:1, at least 3.5:1, at least 4:1, at least 4.5:1, at least 5:1, at least 5.5:1, at least 6:1, at least 6.5:1, at least 7:1, at least 7.5:1, at least 8:1, at least 10:1, at least 12:1, at least 15:1, at least 20:1, at least 25:1, at least 30:1, at least 40:1, at least 50:1, at least 100:1, at least 150:1, at least 200:1, at least 250:1, at least 500:1, or at least 1000:1, or more

[0780] Details of base editor efficiency are described in International PCT Application Nos. PCT/2017/045381 (WO2018/027078) and PCT/US2016/058344 (WO2017/070632), each of which is incorporated herein by reference for its entirety. Also see Komor, A. C., et al., “Programmable editing of a target base in genomic DNA without double-stranded DNA cleavage” Nature 533, 420-424 (2016); Gaudelli, N. M., et al., “Programmable base editing of A•T to G•C in genomic DNA without DNA cleavage” Nature 551, 464-471 (2017); and Komor, A. C., et al., “Improved base excision repair inhibition and bacteriophage Mu Gam protein yields C:G-to-T:A base editors with higher efficiency and product purity” Science Advances 3:eaao4774 (2017), the entire contents of which are hereby incorporated by reference.

[0781] In some embodiments, the editing of the plurality of nucleobase pairs in one or more genes result in formation of at least one intended mutation. In some embodiments, the formation of the at least one intended mutation results in a precise correction of a disease causing mutation. It should be appreciated that the characteristics of the multiplex editing of the base editors as described herein can be applied to any of combination of the methods of using the base editor provided herein.

### Expression of Fusion Proteins in a Host Cell

[0782] Fusion proteins of the disclosure comprising an adenosine deaminase variant may be expressed in virtually any host cell of interest, including but not limited to, bacteria, yeast, fungi, insects, plants, and animal cells, using routine methods known to the skilled artisan. For example, a DNA encoding an adenosine deaminase of the disclosure can be cloned by designing suitable primers for the upstream and downstream of CDS based on the cDNA sequence. The cloned DNA may be directly, or after digestion with a restriction enzyme when desired, or after addition of a suitable linker and/or a nuclear localization signal ligated with a DNA encoding one or more additional components of a base editing system. The base editing system is translated in a host cell to form a complex.

[0783] A DNA encoding a protein domain described herein can be obtained by chemically synthesizing the DNA, or by connecting synthesized partly overlapping oligoDNA short chains by utilizing the PCR method and the Gibson Assembly method to construct a DNA encoding the full length thereof. The advantage of constructing a full-length DNA by chemical synthesis or a combination of PCR method or Gibson Assembly method is that the codon to be used can be designed in CDS full-length according to the host into which the DNA is introduced. In the expression of a heterologous DNA, the protein expression level is expected to increase by converting the DNA sequence thereof to a codon highly frequently used in the host organism. As the data of codon use frequency in host to be used, for example, the genetic code use frequency database (kazusa.or.jp/codon/index.html) disclosed in the home page of Kazusa DNA Research Institute can be used, or documents showing the codon use frequency in each host may be referred to. By reference to the obtained data and the DNA sequence to be introduced, codons showing low use frequency in the host from among those used for the DNA sequence may be converted to a codon coding the same amino acid and showing high use frequency.

[0784] An expression vector containing a DNA encoding a nucleic acid sequence-recognizing module and/or a nucleic acid base converting enzyme can be produced, for example, by linking the DNA to the downstream of a promoter in a suitable expression vector. In some embodiments, animal cell expression plasmids (e.g., pA1-11, pXT1, pRc/CMV, pRc/RSV, pcDNAI/Neo), and animal virus vectors such as retrovirus, vaccinia virus, adenovirus, and the like are used. In other embodiments, Escherichia coli-derived plasmids (e.g., pBR322, pBR325, pUC12, pUC13); Bacillus subtilis-derived plasmids (e.g., pUB110, pTP5, pC194); yeast-derived plasmids (e.g., pSH19, pSH15); insect cell expression plasmids (e.g., pFast-Bac); bacteriophages such as lambda phage and the like; insect virus vectors such as baculovirus and the like (e.g., BmNPV, AcNPV); and the like are used.

[0785] In some embodiments, any promoter appropriate for gene expression in a given host can be used. In a conventional method using DSB, since the survival rate of the host cell sometimes decreases markedly due to the toxicity, it is desirable to increase the number of cells by the start of the induction by using an inductive promoter. However, since sufficient cell proliferation can also be afforded by expressing the nucleic acid-modifying enzyme complex of the present disclosure, a constitution promoter can also be used without limitation.

[0786] For example, without limitation, when the host is an animal cell, SRα promoter, SV40 promoter, LTR promoter, CMV (cytomegalovirus) promoter, RSV (Rous sarcoma virus) promoter, MoMuLV (Moloney mouse leukemia virus) LTR, HSV-TK (simple herpes virus thymidine kinase) promoter and the like are used. Of these, CMV promoter, SRα promoter and the like are suitable for use. When the host is Escherichia coli, a trp promoter, lac promoter, recA promoter, lamda.PL promoter, lpp promoter, T7 promoter and the like are suitable for use. When the host is genus Bacillus, an SPO1 promoter, SPO2 promoter, penP promoter and the like are suitable for use. When the host is a yeast, a Gall/10 promoter, PHO5 promoter, PGK promoter, GAP promoter, ADH promoter and the like are suitable for use. When the host is an insect cell, a polyhedrin promoter, P10 promoter and the like are suitable for use. When the host is a plant cell, a CaMV35S promoter, CaMV19S promoter, NOS promoter and the like are suitable for use.

[0787] In addition to those mentioned above, an expression vector containing an enhancer, splicing signal, terminator, polyA addition signal, a selection marker such as drug resistance gene, auxotrophic complementary gene and the like, replication origin and the like, on demand can be used.

[0788] An RNA encoding a protein domain described herein can be prepared, for example, by transcription to mRNA in an in vitro transcription system known per se by using a vector encoding DNA encoding the above-mentioned nucleic acid sequence-recognizing module and/or a nucleic acid base converting enzyme as a template.

[0789] A fusion protein of the disclosure can be intracellularly expressed by introducing an expression vector containing a DNA encoding a nucleic acid sequence-recognizing module and/or a nucleic acid base converting enzyme into a host cell, and culturing the host cell.

[0790] As the animal cell, cell lines such as monkey COS-7 cell, monkey Vero cell, Chinese hamster ovary (CHO) cell, dhfr gene-deficient CHO cell, mouse L cell, mouse AtT-20 cell, mouse myeloma cell, rat GH3 cell, human FL cell and the like, pluripotent stem cells such as iPS cell, ES cell and the like of human and other mammals, and primary cultured cells prepared from various tissues are used. Furthermore, zebrafish embryo, Xenopus oocyte and the like can also be used.

[0791] For the genus Escherichia, genus Bacillus, yeast, insect cell, insect, animal cell and the like can be used as host cells.

[0792] For the genus Escherichia, Escherichia coli K12.cndot.DH1 (Proc. Natl. Acad. Sci. USA, 60, 160 (1968)), Escherichia coli JM103 (Nucleic Acids Research, 9, 309 (1981)), Escherichia coli JA221 (Journal of Molecular Biology, 120, 517 (1978)), Escherichia coli HB101 (Journal of Molecular Biology, 41, 459 (1969)), Escherichia coli C600 (Genetics, 39, 440 (1954)) and the like can be used.

[0793] For the genus Bacillus, Bacillus subtilis M1114 (Gene, 24, 255 (1983)), Bacillus subtilis 207-21 (Journal of Biochemistry, 95, 87 (1984)) and the like can be used.

[0794] For yeast, Saccharomyces cerevisiae AH22, AH22R.sup.-, NA87-11A, DKD-5D, 20B-12, Schizosaccharomyces pombe NCYC1913, NCYC2036, Pichia pastoris KM71 and the like can be used.

[0795] For insect cells when the virus is AcNPV, cells of cabbage armyworm larva-derived established line (Spodoptera frugiperda cell; Sf cell), MG1 cells derived from the mid-intestine of Trichoplusia ni, HIGHFIVE™ cells derived from an egg of Trichoplusia ni, Mamestra brassicae-derived cells, Estigmena acrea-derived cells and the like can be used. For the BmNPV virus, cells of Bombyx mori-derived established line (Bombyx mori N cell; BmN cell) and the like are used as insect cells. For Sf cells, for example, Sf9 cell (ATCC CRL1711), Sf21 cell [all above, In Vivo, 13, 213-217 (1977)] and the like can be used.

[0796] For insects, for example, larvae of Bombyx mori, Drosophila, cricket and the like can be used (Nature, 315, 592 (1985)).

[0797] For plant cells, suspended cultured cells, callus, protoplast, leaf segment, root segment and the like prepared from various plants (e.g., grain such as rice, wheat, corn (maize) and the like, product crops such as tomato, cucumber, eggplant and the like, garden plants such as carnation, Eustoma russellianum and the like, experiment plants such as tobacco, Arabidopsis thaliana and the like, and the like) can be used.

[0798] All the above-mentioned host cells may be haploid (monoploid), or polyploid (e.g., diploid, triploid, tetraploid and the like). In the conventional mutation introduction methods, mutation is, in principle, introduced into only one homologous chromosome to produce a hetero gene type. Therefore, desired phenotype is not expressed unless dominant mutation occurs, and homozygousness inconveniently requires labor and time. In contrast, according to the present disclosure, since mutation can be introduced into any allele on the homologous chromosome in the genome, the desired phenotype can be expressed in a single generation even in the case of recessive mutation, which is extremely useful since the problem of the conventional method can be solved.

[0799] An expression vector can be introduced by a known method (e.g., lysozyme method, competent method, PEG method, CaCl₂ coprecipitation method, electroporation method, the microinjection method, the particle gun method, lipofection method, Agrobacterium method and the like) according to the kind of the host.

[0800] Escherichia coli can be transformed according to the methods described in, for example, Proc. Natl. Acad. Sci. USA, 69, 2110 (1972), Gene, 17, 107 (1982) and the like.

[0801] The genus Bacillus can be introduced into a vector according to the methods described in, for example, Molecular & General Genetics, 168, 111 (1979) and the like.

[0802] A yeast can be introduced into a vector according to the methods described in, for example, Methods in Enzymology, 194, 182-187 (1991), Proc. Natl. Acad. Sci. USA, 75, 1929 (1978) and the like.

[0803] An insect cell and an insect can be introduced into a vector according to the methods described in, for example, Bio/Technology, 6, 47-55 (1988) and the like.

[0804] An animal cell can be introduced into a vector according to the methods described in, for example, Cell Engineering additional volume 8, New Cell Engineering Experiment Protocol, 263-267 (1995) (published by Shujunsha), and Virology, 52, 456 (1973). A cell introduced with a vector can be cultured according to a known method according to the type of host.

[0805] For example, when Escherichia coli or genus Bacillus is cultured, a liquid medium is suitably used for the culture. The medium typically contains a carbon source, nitrogen source, inorganic substance and the like necessary for the growth of the transformant. Examples of the carbon source include glucose, dextrin, soluble starch, sucrose and the like; examples of the nitrogen source include inorganic or organic substances such as ammonium salts, nitrate salts, corn steep liquor, peptone, casein, meat extract, soybean cake, potato extract and the like; and examples of the inorganic substance include calcium chloride, sodium dihydrogen phosphate, magnesium chloride and the like. The medium may contain yeast extract, vitamins, growth promoting factor and the like. The pH of the medium is about 5 to about 8.

[0806] As a medium for culturing Escherichia coli, for example, M9 medium containing glucose, casamino acid (Journal of Experiments in Molecular Genetics, 431-433, Cold Spring Harbor Laboratory, New York 1972) may be used. Where necessary, for example, agents such as 3-ß-indolylacrylic acid may be added to the medium to ensure an efficient function of a promoter. In general, Escherichia coli is cultured at about 15° to about 43° C. Where necessary, aeration and stirring may be performed.

[0807] The genus Bacillus is generally cultured at about 30° to about 40° C. Where necessary, aeration and stirring may be performed.

[0808] Examples of the medium for culturing yeast include Burkholder minimum medium (Proc. Natl. Acad. Sci. USA, 77, 4505 (1980)), SD medium containing 0.5% casamino acid (Proc. Natl. Acad. Sci. USA, 81, 5330 (1984)) and the like. The pH of the medium is preferably about 5 to about 8. The culture is generally maintained at about 20° C. to about 35° C. Where necessary, aeration and stirring may be performed.

[0809] As a medium for culturing an insect cell or insect, for example, Grace's Insect Medium (Nature, 195, 788 (1962)) containing an additive such as inactivated 10% bovine serum and the like, as appropriate, are used. The pH of the medium is preferably about 6.2 to about 6.4. The culture is generally maintained at about 27° C. Where necessary, aeration and stirring may be performed.

[0810] As a medium for culturing an animal cell, for example, minimum essential medium (MEM) containing about 5 to about 20% of fetal bovine serum (Science, 122, 501 (1952)), Dulbecco's modified Eagle medium (DMEM) (Virology, 8, 396 (1959)), RPMI 1640 medium (The Journal of the American Medical Association, 199, 519 (1967)), 199 medium (Proceeding of the Society for the Biological Medicine, 73, 1 (1950)) and the like are used. The pH of the medium is preferably about 6 to about 8. The culture is generally maintained at about 30° C. to about 40° C. Where necessary, aeration and stirring may be performed.

[0811] When a higher eukaryotic cell, such as animal cell, is used as a host cell, a DNA encoding a base editing system of the present disclosure (e.g., comprising an adenosine deaminase variant) is introduced into a host cell under the regulation of an inducible promoter (e.g., metallothionein promoter (induced by heavy metal ion), heat shock protein promoter (induced by heat shock), Tet-ON/Tet-OFF system promoter (induced by addition or removal of tetracycline or a derivative thereof), steroid-responsive promoter (induced by steroid hormone or a derivative thereof) etc.), the induction substance is added to the medium (or removed from the medium) at an appropriate stage to induce expression of the nucleic acid-modifying enzyme complex, culture is performed for a given period to carry out a base editing and, introduction of a mutation into a target gene, transient expression of the base editing system can be realized.

[0812] Prokaryotic cells such as Escherichia coli and the like can utilize an inducible promoter. Examples of suitable inducible promoters include, but are not limited to, a lac promoter (induced by IPTG), cspA promoter (induced by cold shock), araBAD promoter (induced by arabinose) and the like.

[0813] Alternatively, the above-mentioned inductive promoter can also be utilized as a vector removal mechanism when higher eukaryotic cells, such animal cells and the like, are used as host cells. That is, a vector is mounted with a replication origin that functions in a host cell, and a nucleic acid encoding a protein necessary for replication (e.g., SV40 on and large T antigen, oriP and EBNA-1 etc. for animal cells) of the expression of the nucleic acid encoding the protein is regulated by the above-mentioned inducible promoter. As a result, while the vector is autonomously replicatable in the presence of an induction substance, when the induction substance is removed, autonomous replication is not available, and the vector naturally falls off along with cell division (autonomous replication is not possible by the addition of tetracycline and doxycycline in Tet-OFF system vector).

### Delivery System

[0814] A base editor disclosed herein can be encoded on a nucleic acid that is contained in a viral vector. Viral vectors can include lentivirus, Adenovirus, Retrovirus, and Adeno-associated viruses (AAVs). Viral vectors can be selected based on the application. For example, AAVs are commonly used for gene delivery in vivo due to their mild immunogenicity. Adenoviruses are commonly used as vaccines because of the strong immunogenic response they induce. Packaging capacity of the viral vectors can limit the size of the base editor that can be packaged into the vector. For example, the packaging capacity of the AAVs is ˜4.5 kb including two 145 base inverted terminal repeats (ITRs).

[0815] AAV is a small, single-stranded DNA dependent virus belonging to the parvovirus family. The 4.7 kb wild-type (wt) AAV genome is made up of two genes that encode four replication proteins and three capsid proteins, respectively, and is flanked on either side by 145-bp inverted terminal repeats (ITRs). The virion is composed of three capsid proteins, Vp1, Vp2, and Vp3, produced in a 1:1:10 ratio from the same open reading frame but from differential splicing (Vp1) and alternative translational start sites (Vp2 and Vp3, respectively). Vp3 is the most abundant subunit in the virion and participates in receptor recognition at the cell surface defining the tropism of the virus. A phospholipase domain, which functions in viral infectivity, has been identified in the unique N terminus of Vp1.

[0816] Similar to wt AAV, recombinant AAV (rAAV) utilizes the cis-acting 145-bp ITRs to flank vector transgene cassettes, providing up to 4.5 kb for packaging of foreign DNA. Subsequent to infection, rAAV can express a fusion protein of the invention and persist without integration into the host genome by existing episomally in circular head-to-tail concatemers. Although there are numerous examples of rAAV success using this system, in vitro and in vivo, the limited packaging capacity has limited the use of AAV-mediated gene delivery when the length of the coding sequence of the gene is equal or greater in size than the wt AAV genome.

[0817] The small packaging capacity of AAV vectors makes the delivery of a number of genes that exceed this size and/or the use of large physiological regulatory elements challenging. These challenges can be addressed, for example, by dividing the protein(s) to be delivered into two or more fragments, wherein the N-terminal fragment is fused to a split intein-N and the C-terminal fragment is fused to a split intein-C. These fragments are then packaged into two or more AAV vectors. As used herein, “intein” refers to a self-splicing protein intron (e.g., peptide) that ligates flanking N-terminal and C-terminal exteins (e.g., fragments to be joined). The use of certain inteins for joining heterologous protein fragments is described, for example, in Wood et al., J. Biol. Chem. 289(21); 14512-9 (2014). For example, when fused to separate protein fragments, the inteins IntN and IntC recognize each other, splice themselves out and simultaneously ligate the flanking N- and C-terminal exteins of the protein fragments to which they were fused, thereby reconstituting a full-length protein from the two protein fragments. Other suitable inteins will be apparent to a person of skill in the art.

[0818] A fragment of a fusion protein of the invention can vary in length. In some embodiments, a protein fragment ranges from 2 amino acids to about 1000 amino acids in length. In some embodiments, a protein fragment ranges from about 5 amino acids to about 500 amino acids in length. In some embodiments, a protein fragment ranges from about 20 amino acids to about 200 amino acids in length. In some embodiments, a protein fragment ranges from about 10 amino acids to about 100 amino acids in length. Suitable protein fragments of other lengths will be apparent to a person of skill in the art.

[0819] In some embodiments, a portion or fragment of a nuclease (e.g., Cas9) is fused to an intein. The nuclease can be fused to the N-terminus or the C-terminus of the intein. In some embodiments, a portion or fragment of a fusion protein is fused to an intein and fused to an AAV capsid protein. The intein, nuclease and capsid protein can be fused together in any arrangement (e.g., nuclease-intein-capsid, intein-nuclease-capsid, capsid-intein-nuclease, etc.). In some embodiments, the N-terminus of an intein is fused to the C-terminus of a fusion protein and the C-terminus of the intein is fused to the N-terminus of an AAV capsid protein.

[0820] In one embodiment, dual AAV vectors are generated by splitting a large transgene expression cassette in two separate halves (5′ and 3′ ends, or head and tail), where each half of the cassette is packaged in a single AAV vector (of <5 kb). The re-assembly of the full-length transgene expression cassette is then achieved upon co-infection of the same cell by both dual AAV vectors followed by: (1) homologous recombination (HR) between 5′ and 3′ genomes (dual AAV overlapping vectors); (2) ITR-mediated tail-to-head concatemerization of 5′ and 3′ genomes (dual AAV trans-splicing vectors); or (3) a combination of these two mechanisms (dual AAV hybrid vectors). The use of dual AAV vectors in vivo results in the expression of full-length proteins. The use of the dual AAV vector platform represents an efficient and viable gene transfer strategy for transgenes of >4.7 kb in size.

[0821] The disclosed strategies for designing base editors can be useful for generating base editors capable of being packaged into a viral vector. The use of RNA or DNA viral based systems for the delivery of a base editor takes advantage of highly evolved processes for targeting a virus to specific cells in culture or in the host and trafficking the viral payload to the nucleus or host cell genome. Viral vectors can be administered directly to cells in culture, patients (in vivo), or they can be used to treat cells in vitro, and the modified cells can optionally be administered to patients (ex vivo). Conventional viral based systems could include retroviral, lentivirus, adenoviral, adeno-associated and herpes simplex virus vectors for gene transfer. Integration in the host genome is possible with the retrovirus, lentivirus, and adeno-associated virus gene transfer methods, often resulting in long term expression of the inserted transgene. Additionally, high transduction efficiencies have been observed in many different cell types and target tissues.

[0822] The tropism of a retrovirus can be altered by incorporating foreign envelope proteins, expanding the potential target population of target cells. Lentiviral vectors are retroviral vectors that are able to transduce or infect non-dividing cells and typically produce high viral titers. Selection of a retroviral gene transfer system would therefore depend on the target tissue. Retroviral vectors are comprised of cis-acting long terminal repeats with packaging capacity for up to 6-10 kb of foreign sequence. The minimum cis-acting LTRs are sufficient for replication and packaging of the vectors, which are then used to integrate the therapeutic gene into the target cell to provide permanent transgene expression. Widely used retroviral vectors include those based upon murine leukemia virus (MuLV), gibbon ape leukemia virus (GaLV), Simian Immuno deficiency virus (SIV), human immuno deficiency virus (HIV), and combinations thereof (See, e.g., Buchscher et al., J. Virol. 66:2731-2739 (1992); Johann et al., J. Virol. 66:1635-1640 (1992); Sommnerfelt et al., Virol. 176:58-59 (1990); Wilson et al., J. Virol. 63:2374-2378 (1989); Miller et al., J. Virol. 65:2220-2224 (1991); PCT/US94/05700).

[0823] Retroviral vectors, especially lentiviral vectors, can require polynucleotide sequences smaller than a given length for efficient integration into a target cell. For example, retroviral vectors of length greater than 9 kb can result in low viral titers compared with those of smaller size. In some aspects, a base editor of the present disclosure is of sufficient size so as to enable efficient packaging and delivery into a target cell via a retroviral vector. In some cases, a base editor is of a size so as to allow efficient packing and delivery even when expressed together with a guide nucleic acid and/or other components of a targetable nuclease system.

[0824] In applications where transient expression is preferred, adenoviral based systems can be used. Adenoviral based vectors are capable of very high transduction efficiency in many cell types and do not require cell division. With such vectors, high titer and levels of expression have been obtained. This vector can be produced in large quantities in a relatively simple system. Adeno-associated virus (“AAV”) vectors can also be used to transduce cells with target nucleic acids, e.g., in the in vitro production of nucleic acids and peptides, and for in vivo and ex vivo gene therapy procedures (See, e.g., West et al., Virology 160:38-47 (1987); U.S. Pat. No. 4,797,368; WO 93/24641; Kotin, Human Gene Therapy 5:793-801 (1994); Muzyczka, J. Clin. Invest. 94:1351 (1994). The construction of recombinant AAV vectors is described in a number of publications, including U.S. Pat. No. 5,173,414; Tratschin et al., Mol. Cell. Biol. 5:3251-3260 (1985); Tratschin, et al., Mol. Cell. Biol. 4:2072-2081 (1984); Hermonat & Muzyczka, PNAS 81:6466-6470 (1984); and Samulski et al., J. Virol. 63:03822-3828 (1989).

[0825] A base editor described herein can therefore be delivered with viral vectors. One or more components of the base editor system can be encoded on one or more viral vectors. For example, a base editor and guide nucleic acid can be encoded on a single viral vector. In other cases, the base editor and guide nucleic acid are encoded on different viral vectors. In either case, the base editor and guide nucleic acid can each be operably linked to a promoter and terminator.

[0826] The combination of components encoded on a viral vector can be determined by the cargo size constraints of the chosen viral vector.

### Non-Viral Delivery of Base Editors

[0827] Non-viral delivery approaches for base editors are also available. One important category of non-viral nucleic acid vectors are nanoparticles, which can be organic or inorganic. Nanoparticles are well known in the art. Any suitable nanoparticle design can be used to deliver genome editing system components or nucleic acids encoding such components. For instance, organic (e.g. lipid and/or polymer) nanoparticles can be suitable for use as delivery vehicles in certain embodiments of this disclosure. Exemplary lipids for use in nanoparticle formulations, and/or gene transfer are shown in Table 15 (below).

TABLE 15
Lipids Used for Gene Transfer

| Lipid | Abbreviation | Feature |
|---|---|---|
| 1,2-Dioleoyl-sn-glycero-3-phosphatidylcholine | DOPC | Helper |
| 1,2-Dioleoyl-sn-glycero-3-phosphatidylethanolamine | DOPE | Helper |
| Cholesterol | | Helper |
| N-[1-(2,3-Dioleyloxy)prophyl]N,N,N-trimethylammonium | DOTMA | Cationic |
| chloride | | |
| 1,2-Dioleoyloxy-3-trimethylammonium-propane | DOTAP | Cationic |
| Dioctadecylamidoglycylspermine | DOGS | Cationic |
| N-(3-Aminopropyl)-N,N-dimethyl-2,3-bis(dodecyloxy)-1- | GAP-DLRIE | Cationic |
| propanaminium bromide | | |
| Cetyltrimethylammonium bromide | CTAB | Cationic |
| 6-Lauroxyhexyl ornithinate | LHON | Cationic |
| 1-(2,3-Dioleoyloxypropyl)-2,4,6-trimethylpyridinium | 2Oc | Cationic |
| 2,3-Dioleyloxy-N-[2(sperminecarboxamido-ethyl]-N,N- | DOSPA | Cationic |
| dimethyl-1-propanaminium trifluoroacetate | | |
| 1,2-Dioleyl-3-trimethylammonium-propane | DOPA | Cationic |
| N-(2-Hydroxyethyl)-N,N-dimethyl-2,3-bis(tetradecyloxy)-1- | MDRIE | Cationic |
| propanaminium bromide | | |
| Dimyristooxypropyl dimethyl hydroxyethyl ammonium | DMRI | Cationic |
| bromide | | |
| 3β-[N-(N',N'-Dimethylaminoethane)-carbamoyl]cholesterol | DC-Chol | Cationic |
| Bis-guanidium-tren-cholesterol | BGTC | Cationic |
| 1,3-Diodeoxy-2-(6-carboxy-spermyl)-propylamide | DOSPER | Cationic |
| Dimethyloctadecylammonium bromide | DDAB | Cationic |
| Dioctadecylamidoglicylspermidin | DSL | Cationic |
| rac-[(2,3-Dioctadecyloxypropyl)(2-hydroxyethyl)]- | CLIP-1 | Cationic |
| dimethylammonium chloride | | |
| rac-[2(2,3-Dihexadecyloxypropyl- | CLIP-6 | Cationic |
| oxymethyloxy)ethyl]trimethylammoniun bromide | | |
| Ethyldimyristoylphosphatidylcholine | EDMPC | Cationic |
| 1,2-Distearyloxy-N,N-dimethyl-3-aminopropane | DSDMA | Cationic |
| 1,2-Dimyristoyl-trimethylammonium propane | DMTAP | Cationic |
| O,O'-Dimyristyl-N-lysyl aspartate | DMKE | Cationic |
| 1,2-Distearoyl-sn-glycero-3-ethylpho sphocholine | DSEPC | Cationic |
| N-Palmitoyl D-erythro-sphingosyl carbamoyl-spermine | CCS | Cationic |
| N-t-Butyl-N0-tetradecyl-3-tetradecylaminopropionamidine | diC14-amidine | Cationic |
| Octadecenolyoxy[ethyl-2-heptadecenyl-3 hydroxyethyl] | DOTIM | Cationic |
| imidazolinium chloride | | |
| N1-Cholesteryloxycarbonyl-3,7-diazanonane-1,9-diamine | CDAN | Cationic |
| 2-(3-[Bis(3-amino-propyl)-amino]propylamino)-N- | RPR209120 | Cationic |
| ditetradecylcarbmoylme-ethyl-acetamide | | |
| 1,2-dilinoleyloxy-3-dimethylaminopropane | DLinDMA | Cationic |
| 2,2-dilinoleyl-4-dimethylaminoethyl-[1,3]-dioxolane | DLin-KC2- | Cationic |
| | DMA | |
| dilinoleyl-methyl-4-dimethylaminobutyrate | DLin-MC3- | Cationic |
| | DMA | |

Table 16 lists exemplary polymers for use in gene transfer and/or nanoparticle formulations.

TABLE 16
Polymers Used for Gene Transfer

| Polymer | Abbreviation |
|---|---|
| Poly(ethylene)glycol | PEG |
| Polyethylenimine | PEI |
| Dithiobis (succinimidylpropionate) | DSP |
| Dimethyl-3,3′-dithiobispropionimidate | DTBP |
| Poly(ethylene imine)biscarbamate | PEIC |
| Poly (L-lysine) | PLL |
| Histidine modified PLL | |
| Poly(N-vinylpyrrolidone) | PVP |
| Poly(propylenimine) | PPI |
| Poly(amidoamine) | PAMAM |
| Poly(amidoethylenimine) | SS-PAEI |
| Triethylenetetramine | TETA |
| Poly(β-aminoester) | |
| Poly(4-hydroxy-L-proline ester) | PHP |
| Poly(allylamine) | |
| Poly(α-[4-aminobutyl]-L-glycolic acid) | PAGA |
| Poly(D,L-lactic-co-glycolic acid) | PLGA |
| Poly(N-ethyl-4-vinylpyridinium bromide) | |
| Poly(phosphazene)s | PPZ |
| Poly(phosphoester)s | PPE |
| Poly(phosphoramidate)s | PPA |
| Poly(N-2-hydroxypropylmethacrylamide) | pHPMA |
| Poly (2-(dimethylamino)ethyl methacrylate) | pDMAEMA |
| Poly(2-aminoethyl propylene phosphate) | PPE-EA |
| Chitosan | |
| Galactosylated chitosan | |
| N-Dodacylated chitosan | |
| Histone | |
| Collagen | |
| Dextran-spermine | D-SPM |

Table 17 summarizes delivery methods for a polynucleotide encoding a fusion protein described herein.

TABLE 17

| | | Delivery into | | | Type of |
|---|---|---|---|---|---|
| | | Non-Dividing | Duration of | Genome | Molecule |
| Delivery | Vector/Mode | Cells | Expression | Integration | Delivered |
| Physical | (e.g., | YES | Transient | NO | Nucleic Acids |
| | electroporation, | | | | and Proteins |
| | particle gun, | | | | |
| | Calcium | | | | |
| | Phosphate | | | | |
| | transfection | | | | |
| Viral | Retrovirus | NO | Stable | YES | RNA |
| | Lentivirus | YES | Stable | YES/NO with | RNA |
| | | | | modification | |
| | Adenovirus | YES | Transient | NO | DNA |
| | Adeno- | YES | Stable | NO | DNA |
| | Associated | | | | |
| | Virus (AAV) | | | | |
| | Vaccinia Virus | YES | Very | NO | DNA |
| | | | Transient | | |
| | Herpes Simplex | YES | Stable | NO | DNA |
| | Virus | | | | |
| Non-Viral | Cationic | YES | Transient | Depends on | Nucleic Acids |
| | Liposomes | | | what is | and Proteins |
| | | | | delivered | |
| | Polymeric | YES | Transient | Depends on | Nucleic Acids |
| | Nanoparticles | | | what is | and Proteins |
| | | | | delivered | |
| Biological | Attenuated | YES | Transient | NO | Nucleic Acids |
| Non-Viral | Bacteria | | | | |
| Delivery | Engineered | YES | Transient | NO | Nucleic Acids |
| Vehicles | Bacteriophages | | | | |
| | Mammalian | YES | Transient | NO | Nucleic Acids |
| | Virus-like | | | | |
| | Particles | | | | |
| | Biological | YES | Transient | NO | Nucleic Acids |
| | liposomes: | | | | |
| | Erythrocyte | | | | |
| | Ghosts and | | | | |
| | Exosomes | | | | |

[0828] In another aspect, the delivery of genome editing system components or nucleic acids encoding such components, for example, a nucleic acid binding protein such as, for example, Cas9 or variants thereof, and a gRNA targeting a genomic nucleic acid sequence of interest, may be accomplished by delivering a ribonucleoprotein (RNP) to cells. The RNP comprises the nucleic acid binding protein, e.g., Cas9, in complex with the targeting gRNA. RNPs may be delivered to cells using known methods, such as electroporation, nucleofection, or cationic lipid-mediated methods, for example, as reported by Zuris, J. A. et al., 2015, Nat. Biotechnology, 33(1):73-80. RNPs are advantageous for use in CRISPR base editing systems, particularly for cells that are difficult to transfect, such as primary cells. In addition, RNPs can also alleviate difficulties that may occur with protein expression in cells, especially when eukaryotic promoters, e.g., CMV or EF1A, which may be used in CRISPR plasmids, are not well-expressed. Advantageously, the use of RNPs does not require the delivery of foreign DNA into cells. Moreover, because an RNP comprising a nucleic acid binding protein and gRNA complex is degraded over time, the use of RNPs has the potential to limit off-target effects. In a manner similar to that for plasmid based techniques, RNPs can be used to deliver binding protein (e.g., Cas9 variants) and to direct homology directed repair (HDR).

[0829] A promoter used to drive base editor coding nucleic acid molecule expression can include AAV ITR. This can be advantageous for eliminating the need for an additional promoter element, which can take up space in the vector. The additional space freed up can be used to drive the expression of additional elements, such as a guide nucleic acid or a selectable marker. ITR activity is relatively weak, so it can be used to reduce potential toxicity due to over expression of the chosen nuclease.

[0830] Any suitable promoter can be used to drive expression of the base editor and, where appropriate, the guide nucleic acid. For ubiquitous expression, promoters that can be used include CMV, CAG, CBh, PGK, SV40, Ferritin heavy or light chains, etc. For brain or other CNS cell expression, suitable promoters can include: SynapsinI for all neurons, CaMKIIalpha for excitatory neurons, GAD67 or GAD65 or VGAT for GABAergic neurons, etc. For liver cell expression, suitable promoters include the Albumin promoter. For lung cell expression, suitable promoters can include SP-B. For endothelial cells, suitable promoters can include ICAM. For hematopoietic cells suitable promoters can include IFNbeta or CD45. For Osteoblasts suitable promoters can include OG-2.

[0831] In some cases, a base editor of the present disclosure is of small enough size to allow separate promoters to drive expression of the base editor and a compatible guide nucleic acid within the same nucleic acid molecule. For instance, a vector or viral vector can comprise a first promoter operably linked to a nucleic acid encoding the base editor and a second promoter operably linked to the guide nucleic acid.

[0832] The promoter used to drive expression of a guide nucleic acid can include: Pol III promoters such as U6 or H1 Use of Pol II promoter and intronic cassettes to express gRNA Adeno Associated Virus (AAV).

[0833] A base editor described herein with or without one or more guide nucleic can be delivered using adeno associated virus (AAV), lentivirus, adenovirus or other plasmid or viral vector types, in particular, using formulations and doses from, for example, U.S. Pat. No. 8,454,972 (formulations, doses for adenovirus), U.S. Pat. No. 8,404,658 (formulations, doses for AAV) and U.S. Pat. No. 5,846,946 (formulations, doses for DNA plasmids) and from clinical trials and publications regarding the clinical trials involving lentivirus, AAV and adenovirus. For example, for AAV, the route of administration, formulation and dose can be as in U.S. Pat. No. 8,454,972 and as in clinical trials involving AAV. For Adenovirus, the route of administration, formulation and dose can be as in U.S. Pat. No. 8,404,658 and as in clinical trials involving adenovirus. For plasmid delivery, the route of administration, formulation and dose can be as in U.S. Pat. No. 5,846,946 and as in clinical studies involving plasmids. Doses can be based on or extrapolated to an average 70 kg individual (e.g. a male adult human), and can be adjusted for patients, subjects, mammals of different weight and species. Frequency of administration is within the ambit of the medical or veterinary practitioner (e.g., physician, veterinarian), depending on usual factors including the age, sex, general health, other conditions of the patient or subject and the particular condition or symptoms being addressed. The viral vectors can be injected into the tissue of interest. For cell-type specific base editing, the expression of the base editor and optional guide nucleic acid can be driven by a cell-type specific promoter.

[0834] For in vivo delivery, AAV can be advantageous over other viral vectors. In some cases, AAV allows low toxicity, which can be due to the purification method not requiring ultra-centrifugation of cell particles that can activate the immune response. In some cases, AAV allows low probability of causing insertional mutagenesis because it doesn't integrate into the host genome.

[0835] AAV has a packaging limit of 4.5 or 4.75 Kb. This means disclosed base editor as well as a promoter and transcription terminator can fit into a single viral vector. Constructs larger than 4.5 or 4.75 Kb can lead to significantly reduced virus production. For example, SpCas9 is quite large, the gene itself is over 4.1 Kb, which makes it difficult for packing into AAV. Therefore, embodiments of the present disclosure include utilizing a disclosed base editor which is shorter in length than conventional base editors. In some examples, the base editors are less than 4 kb. Disclosed base editors can be less than 4.5 kb, 4.4 kb, 4.3 kb, 4.2 kb, 4.1 kb, 4 kb, 3.9 kb, 3.8 kb, 3.7 kb, 3.6 kb, 3.5 kb, 3.4 kb, 3.3 kb, 3.2 kb, 3.1 kb, 3 kb, 2.9 kb, 2.8 kb, 2.7 kb, 2.6 kb, 2.5 kb, 2 kb, or 1.5 kb. In some cases, the disclosed base editors are 4.5 kb or less in length.

[0836] An AAV can be AAV1, AAV2, AAV5 or any combination thereof. One can select the type of AAV with regard to the cells to be targeted; e.g., one can select AAV serotypes 1, 2, 5 or a hybrid capsid AAV1, AAV2, AAV5 or any combination thereof for targeting brain or neuronal cells; and one can select AAV4 for targeting cardiac tissue. AAV8 is useful for delivery to the liver. A tabulation of certain AAV serotypes as to these cells can be found in Grimm, D. et al, J. Virol. 82: 5887-5911 (2008)).

[0837] Lentiviruses are complex retroviruses that have the ability to infect and express their genes in both mitotic and post-mitotic cells. The most commonly known lentivirus is the human immunodeficiency virus (HIV), which uses the envelope glycoproteins of other viruses to target a broad range of cell types.

[0838] Lentiviruses can be prepared as follows. After cloning pCasES10 (which contains a lentiviral transfer plasmid backbone), HEK293FT at low passage (p=5) were seeded in a T-75 flask to 50% confluence the day before transfection in DMEM with 10% fetal bovine serum and without antibiotics. After 20 hours, media is changed to OptiMEM (serum-free) media and transfection was done 4 hours later. Cells are transfected with 10 μg of lentiviral transfer plasmid (pCasES10) and the following packaging plasmids: 5 μg of pMD2.G (VSV-g pseudotype), and 7.5 μg of psPAX2 (gag/pol/rev/tat). Transfection can be done in 4 mL OptiMEM with a cationic lipid delivery agent (50 μl Lipofectamine 2000 and 100 ul Plus reagent). After 6 hours, the media is changed to antibiotic-free DMEM with 10% fetal bovine serum. These methods use serum during cell culture, but serum-free methods are preferred.

[0839] Lentivirus can be purified as follows. Viral supernatants are harvested after 48 hours. Supernatants are first cleared of debris and filtered through a 0.45 μm low protein binding (PVDF) filter. They are then spun in an ultracentrifuge for 2 hours at 24,000 rpm. Viral pellets are resuspended in 50 μl of DMEM overnight at 4° C. They are then aliquoted and immediately frozen at −80° C.

[0840] In another embodiment, minimal non-primate lentiviral vectors based on the equine infectious anemia virus (EIAV) are also contemplated. In another embodiment, RETINOSTAT®, an equine infectious anemia virus-based lentiviral gene therapy vector that expresses angiostatic proteins endostatin and angiostatin that is contemplated to be delivered via a subretinal injection. In another embodiment, use of self-inactivating lentiviral vectors is contemplated.

[0841] Any RNA of the systems, for example a guide RNA or a base editor-encoding mRNA, can be delivered in the form of RNA. Base editor-encoding mRNA can be generated using in vitro transcription. For example, nuclease mRNA can be synthesized using a PCR cassette containing the following elements: T7 promoter, optional kozak sequence (GCCACC), nuclease sequence, and 3′ UTR such as a 3′ UTR from beta globin-polyA tail. The cassette can be used for transcription by T7 polymerase. Guide polynucleotides (e.g., gRNA) can also be transcribed using in vitro transcription from a cassette containing a T7 promoter, followed by the sequence “GG”, and guide polynucleotide sequence.

[0842] To enhance expression and reduce possible toxicity, the base editor-coding sequence and/or the guide nucleic acid can be modified to include one or more modified nucleoside e.g. using pseudo-U or 5-Methyl-C.

[0843] The disclosure in some embodiments comprehends a method of modifying a cell or organism. The cell can be a prokaryotic cell or a eukaryotic cell. The cell can be a mammalian cell. The mammalian cell many be a non-human primate, bovine, porcine, rodent or mouse cell. The modification introduced to the cell by the base editors, compositions and methods of the present disclosure can be such that the cell and progeny of the cell are altered for improved production of biologic products such as an antibody, starch, alcohol or other desired cellular output. The modification introduced to the cell by the methods of the present disclosure can be such that the cell and progeny of the cell include an alteration that changes the biologic product produced.

[0844] The system can comprise one or more different vectors. In an aspect, the base editor is codon optimized for expression the desired cell type, preferentially a eukaryotic cell, preferably a mammalian cell or a human cell.

[0845] In general, codon optimization refers to a process of modifying a nucleic acid sequence for enhanced expression in the host cells of interest by replacing at least one codon (e.g. about or more than about 1, 2, 3, 4, 5, 10, 15, 20, 25, 50, or more codons) of the native sequence with codons that are more frequently or most frequently used in the genes of that host cell while maintaining the native amino acid sequence. Various species exhibit particular bias for certain codons of a particular amino acid. Codon bias (differences in codon usage between organisms) often correlates with the efficiency of translation of messenger RNA (mRNA), which is in turn believed to be dependent on, among other things, the properties of the codons being translated and the availability of particular transfer RNA (tRNA) molecules. The predominance of selected tRNAs in a cell is generally a reflection of the codons used most frequently in peptide synthesis. Accordingly, genes can be tailored for optimal gene expression in a given organism based on codon optimization. Codon usage tables are readily available, for example, at the “Codon Usage Database” available at www.kazusa.orjp/codon/ (visited Jul. 9, 2002), and these tables can be adapted in a number of ways. See, Nakamura, Y., et al. “Codon usage tabulated from the international DNA sequence databases: status for the year 2000” Nucl. Acids Res. 28:292 (2000). Computer algorithms for codon optimizing a particular sequence for expression in a particular host cell are also available, such as Gene Forge (Aptagen; Jacobus, Pa.), are also available. In some embodiments, one or more codons (e.g. 1, 2, 3, 4, 5, 10, 15, 20, 25, 50, or more, or all codons) in a sequence encoding an engineered nuclease correspond to the most frequently used codon for a particular amino acid.

[0846] Packaging cells are typically used to form virus particles that are capable of infecting a host cell. Such cells include 293 cells, which package adenovirus, and psi.2 cells or PA317 cells, which package retrovirus. Viral vectors used in gene therapy are usually generated by producing a cell line that packages a nucleic acid vector into a viral particle. The vectors typically contain the minimal viral sequences required for packaging and subsequent integration into a host, other viral sequences being replaced by an expression cassette for the polynucleotide(s) to be expressed. The missing viral functions are typically supplied in trans by the packaging cell line. For example, AAV vectors used in gene therapy typically only possess ITR sequences from the AAV genome which are required for packaging and integration into the host genome. Viral DNA can be packaged in a cell line, which contains a helper plasmid encoding the other AAV genes, namely rep and cap, but lacking ITR sequences. The cell line can also be infected with adenovirus as a helper. The helper virus can promote replication of the AAV vector and expression of AAV genes from the helper plasmid. The helper plasmid in some cases is not packaged in significant amounts due to a lack of ITR sequences. Contamination with adenovirus can be reduced by, e.g., heat treatment to which adenovirus is more sensitive than AAV.

### Inteins

[0847] In some embodiments, a portion or fragment of a nuclease (e.g., Cas9) is fused to an intein. The nuclease can be fused to the N-terminus or the C-terminus of the intein. In some embodiments, a portion or fragment of a fusion protein is fused to an intein and fused to an AAV capsid protein. The intein, nuclease and capsid protein can be fused together in any arrangement (e.g., nuclease-intein-capsid, intein-nuclease-capsid, capsid-intein-nuclease, etc.). In some embodiments, the N-terminus of an intein is fused to the C-terminus of a fusion protein and the C-terminus of the intein is fused to the N-terminus of an AAV capsid protein.

[0848] Inteins (intervening protein) are auto-processing domains found in a variety of diverse organisms, which carry out a process known as protein splicing. Protein splicing is a multi-step biochemical reaction comprised of both the cleavage and formation of peptide bonds. While the endogenous substrates of protein splicing are proteins found in intein-containing organisms, inteins can also be used to chemically manipulate virtually any polypeptide backbone.

[0849] In protein splicing, the intein excises itself out of a precursor polypeptide by cleaving two peptide bonds, thereby ligating the flanking extein (external protein) sequences via the formation of a new peptide bond. This rearrangement occurs post-translationally (or possibly co-translationally). Intein-mediated protein splicing occurs spontaneously, requiring only the folding of the intein domain.

[0850] About 5% of inteins are split inteins, which are transcribed and translated as two separate polypeptides, the N-intein and C-intein, each fused to one extein. Upon translation, the intein fragments spontaneously and non-covalently assemble into the canonical intein structure to carry out protein splicing in trans. The mechanism of protein splicing entails a series of acyl-transfer reactions that result in the cleavage of two peptide bonds at the intein-extein junctions and the formation of a new peptide bond between the N- and C-exteins. This process is initiated by activation of the peptide bond joining the N-extein and the N-terminus of the intein. Virtually all inteins have a cysteine or serine at their N-terminus that attacks the carbonyl carbon of the C-terminal N-extein residue. This N to O/S acyl-shift is facilitated by a conserved threonine and histidine (referred to as the TXXH motif), along with a commonly found aspartate, which results in the formation of a linear (thio)ester intermediate. Next, this intermediate is subject to trans-(thio)esterification by nucleophilic attack of the first C-extein residue (+1), which is a cysteine, serine, or threonine. The resulting branched (thio)ester intermediate is resolved through a unique transformation: cyclization of the highly conserved C-terminal asparagine of the intein. This process is facilitated by the histidine (found in a highly conserved HNF motif) and the penultimate histidine and may also involve the aspartate. This succinimide formation reaction excises the intein from the reactive complex and leaves behind the exteins attached through a non-peptidic linkage. This structure rapidly rearranges into a stable peptide bond in an intein-independent fashion.

[0851] In some embodiments, an N-terminal fragment of a base editor (e.g., ABE, CBE) is fused to a split intein-N and a C-terminal fragment is fused to a split intein-C. These fragments are then packaged into two or more AAV vectors. The use of certain inteins for joining heterologous protein fragments is described, for example, in Wood et al., J. Biol. Chem. 289(21); 14512-9 (2014). For example, when fused to separate protein fragments, the inteins IntN and IntC recognize each other, splice themselves out and simultaneously ligate the flanking N- and C-terminal exteins of the protein fragments to which they were fused, thereby reconstituting a full-length protein from the two protein fragments. Other suitable inteins will be apparent to a person of skill in the art.

[0852] In some embodiments, an ABE was split into N- and C-terminal fragments at Ala, Ser, Thr, or Cys residues within selected regions of SpCas9. These regions correspond to loop regions identified by Cas9 crystal structure analysis. The N-terminus of each fragment is fused to an intein-N and the C-terminus of each fragment is fused to an intein C at amino acid positions S303, T310, T313, S355, A456, S460, A463, T466, S469, T472, T474, C574, S577, A589, and S590, which are indicated in bold capital letters in the sequence below.

| | |
|---|---|
| 1 | mdkkysigld igtnsvgwav itdeykvpsk kfkvlgntdr hsikknliga llfdsgetae |
| 61 | atrlkrtarr rytrrknric ylqeifsnem akvddsffhr leesfiveed kkherhpifg |
| 121 | nivdevayhe kyptiyhlrk klvdstdkad lrliylalah mikfrghfli egdlnpdnsd |
| 181 | vdklfiqlvq tynqlfeenp inasgvdaka ilsarlsksr rlenliaqlp gekknglfgn |
| 241 | lialslgltp nfksnfdlae daklqlskdt ydddldnlla qigdqyadlf laaknlsdai |
| 301 | llSdilrvnT eiTkaplsas mikrydehhq dltllkalvr qqlpekykei ffdqSkngya |
| 361 | gyidggasqe efykfikpil ekmdgteell vklnredllr kqrtfdngsi phqihlgelh |
| 421 | ailrrqedfy pflkdnreki ekiltfripy yvgplArgnS rfAwmTrkSe eTiTpwnfee |
| 481 | vvdkgasaqs fiermtnfdk nlpnekvlpk hsllyeyftv yneltkvkyv tegmrkpafl |
| 541 | sgeqkkaivd llfktnrkvt vkqlkedyfk kieCfdSvei sgvedrfnAS lgtyhdllki |
| 601 | ikdkdfldne enedilediv ltltlfedre mieerlktya hlfddkvmkq lkrrrytgwg |
| 661 | rlsrklingi rdkqsgktil dflksdgfan rnfmqlihdd sltfkediqk aqvsgqgdsl |
| 721 | hehianlags paikkgilqt vkvvdelvkv mgrhkpeniv iemarenqtt qkgqknsrer |
| 781 | mkrieegike lgsqilkehp ventqlqnek lylyylqngr dmyvdqeldi nrlsdydvdh |
| 841 | ivpqsflkdd sidnkvltrs dknrgksdnv pseevvkkmk nywrqllnak litqrkfdnl |
| 901 | tkaergglse ldkagfikrq lvetrqitkh vaqildsrmn tkydendkli revkvitlks |
| 961 | klvsdfrkdf qfykvreinn yhhahdayln avvgtalikk ypklesefvy gdykvydvrk |
| 1021 | miakseqeig katakyffys nimnffktei tlangeirkr plietngetg eivwdkgrdf |
| 1081 | atvrkvlsmp qvnivkktev qtggfskesi lpkrnsdkli arkkdwdpkk yggfdsptva |
| 1141 | ysvlvvakve kgkskklksv kellgitime rssfeknpid fleakgykev kkdliiklpk |
| 1201 | yslfelengr krmlasagel qkgnelalps kyvnflylas hyeklkgspe dneqkqlfve |
| 1261 | qhkhyldeii eqisefskrv iladanldkv lsaynkhrdk pireqaenii hlftltnlga |
| 1321 | paafkyfdtt idrkrytstk evldatlihq sitglyetri dlsqlggd |

### Pharmaceutical Compositions

[0853] Other aspects of the present disclosure relate to pharmaceutical compositions comprising any of the base editors, fusion proteins, the fusion protein-guide polynucleotide complexes, or the edited cells described herein. The term “pharmaceutical composition”, as used herein, refers to a composition formulated for pharmaceutical use. In some embodiments, the pharmaceutical composition further comprises a pharmaceutically acceptable carrier. In some embodiments, the pharmaceutical composition comprises additional agents (e.g., for specific delivery, increasing half-life, or other therapeutic compounds).

[0854] As used here, the term “pharmaceutically-acceptable carrier” means a pharmaceutically-acceptable material, composition or vehicle, such as a liquid or solid filler, diluent, excipient, manufacturing aid (e.g., lubricant, talc magnesium, calcium or zinc stearate, or steric acid), or solvent encapsulating material, involved in carrying or transporting the compound from one site (e.g., the delivery site) of the body, to another site (e.g., organ, tissue or portion of the body). A pharmaceutically acceptable carrier is “acceptable” in the sense of being compatible with the other ingredients of the formulation and not injurious to the tissue of the subject (e.g., physiologically compatible, sterile, physiologic pH, etc.).

[0855] Some nonlimiting examples of materials which can serve as pharmaceutically-acceptable carriers include: (1) sugars, such as lactose, glucose and sucrose; (2) starches, such as corn starch and potato starch; (3) cellulose, and its derivatives, such as sodium carboxymethyl cellulose, methylcellulose, ethyl cellulose, microcrystalline cellulose and cellulose acetate; (4) powdered tragacanth; (5) malt; (6) gelatin; (7) lubricating agents, such as magnesium stearate, sodium lauryl sulfate and talc; (8) excipients, such as cocoa butter and suppository waxes; (9) oils, such as peanut oil, cottonseed oil, safflower oil, sesame oil, olive oil, corn oil and soybean oil; (10) glycols, such as propylene glycol; (11) polyols, such as glycerin, sorbitol, mannitol and polyethylene glycol (PEG); (12) esters, such as ethyl oleate and ethyl laurate; (13) agar; (14) buffering agents, such as magnesium hydroxide and aluminum hydroxide; (15) alginic acid; (16) pyrogen-free water; (17) isotonic saline; (18) Ringer's solution; (19) ethyl alcohol; (20) pH buffered solutions; (21) polyesters, polycarbonates and/or polyanhydrides; (22) bulking agents, such as polypeptides and amino acids (23) serum alcohols, such as ethanol; and (23) other non-toxic compatible substances employed in pharmaceutical formulations. Wetting agents, coloring agents, release agents, coating agents, sweetening agents, flavoring agents, perfuming agents, preservative and antioxidants can also be present in the formulation. The terms such as “excipient,” “carrier,” “pharmaceutically acceptable carrier,” “vehicle,” or the like are used interchangeably herein.

[0856] Pharmaceutical compositions can comprise one or more pH buffering compounds to maintain the pH of the formulation at a predetermined level that reflects physiological pH, such as in the range of about 5.0 to about 8.0. The pH buffering compound used in the aqueous liquid formulation can be an amino acid or mixture of amino acids, such as histidine or a mixture of amino acids such as histidine and glycine. Alternatively, the pH buffering compound is preferably an agent which maintains the pH of the formulation at a predetermined level, such as in the range of about 5.0 to about 8.0, and which does not chelate calcium ions. Illustrative examples of such pH buffering compounds include, but are not limited to, imidazole and acetate ions. The pH buffering compound may be present in any amount suitable to maintain the pH of the formulation at a predetermined level.

[0857] Pharmaceutical compositions can also contain one or more osmotic modulating agents, i.e., a compound that modulates the osmotic properties (e.g, tonicity, osmolality, and/or osmotic pressure) of the formulation to a level that is acceptable to the blood stream and blood cells of recipient individuals. The osmotic modulating agent can be an agent that does not chelate calcium ions. The osmotic modulating agent can be any compound known or available to those skilled in the art that modulates the osmotic properties of the formulation. One skilled in the art may empirically determine the suitability of a given osmotic modulating agent for use in the inventive formulation. Illustrative examples of suitable types of osmotic modulating agents include, but are not limited to: salts, such as sodium chloride and sodium acetate; sugars, such as sucrose, dextrose, and mannitol; amino acids, such as glycine; and mixtures of one or more of these agents and/or types of agents. The osmotic modulating agent(s) may be present in any concentration sufficient to modulate the osmotic properties of the formulation.

[0858] In some embodiments, the pharmaceutical composition is formulated for delivery to a subject, e.g., for gene editing. Suitable routes of administrating the pharmaceutical composition described herein include, without limitation: topical, subcutaneous, transdermal, intradermal, intralesional, intraarticular, intraperitoneal, intravesical, transmucosal, gingival, intradental, intracochlear, transtympanic, intraorgan, epidural, intrathecal, intramuscular, intravenous, intravascular, intraosseus, periocular, intratumoral, intracerebral, and intracerebroventricular administration.

[0859] In some embodiments, the pharmaceutical composition described herein is administered locally to a diseased site, e.g., a tumor site. In some embodiments, the pharmaceutical composition described herein is administered to a subject by injection, by means of a catheter, by means of a suppository, or by means of an implant, the implant being of a porous, non-porous, or gelatinous material, including a membrane, such as a sialastic membrane, or a fiber.

[0860] In other embodiments, the pharmaceutical composition described herein is delivered in a controlled release system. In one embodiment, a pump can be used (See, e.g., Langer, 1990, Science 249: 1527-1533; Sefton, 1989, CRC Crit. Ref. Biomed. Eng. 14:201; Buchwald et al., 1980, Surgery 88:507; Saudek et al., 1989, N. Engl. J. Med. 321:574). In another embodiment, polymeric materials can be used. (See, e.g., Medical Applications of Controlled Release (Langer and Wise eds., CRC Press, Boca Raton, Fla., 1974); Controlled Drug Bioavailability, Drug Product Design and Performance (Smolen and Ball eds., Wiley, New York, 1984); Ranger and Peppas, 1983, Macromol. Sci. Rev. Macromol. Chem. 23:61. See also Levy et al., 1985, Science 228: 190; During et al., 1989, Ann. Neurol. 25:351; Howard et ah, 1989, J. Neurosurg. 71: 105.) Other controlled release systems are discussed, for example, in Langer, supra.

[0861] In some embodiments, the pharmaceutical composition is formulated in accordance with routine procedures as a composition adapted for intravenous or subcutaneous administration to a subject, e.g., a human. In some embodiments, pharmaceutical composition for administration by injection are solutions in sterile isotonic use as solubilizing agent and a local anesthetic such as lignocaine to ease pain at the site of the injection. Generally, the ingredients are supplied either separately or mixed together in unit dosage form, for example, as a dry lyophilized powder or water free concentrate in a hermetically sealed container such as an ampoule or sachette indicating the quantity of active agent. Where the pharmaceutical is to be administered by infusion, it can be dispensed with an infusion bottle containing sterile pharmaceutical grade water or saline. Where the pharmaceutical composition is administered by injection, an ampoule of sterile water for injection or saline can be provided so that the ingredients can be mixed prior to administration.

[0862] A pharmaceutical composition for systemic administration can be a liquid, e.g., sterile saline, lactated Ringer's or Hank's solution. In addition, the pharmaceutical composition can be in solid forms and re-dissolved or suspended immediately prior to use. Lyophilized forms are also contemplated. The pharmaceutical composition can be contained within a lipid particle or vesicle, such as a liposome or microcrystal, which is also suitable for parenteral administration. The particles can be of any suitable structure, such as unilamellar or plurilamellar, so long as compositions are contained therein. Compounds can be entrapped in “stabilized plasmid-lipid particles” (SPLP) containing the fusogenic lipid dioleoylphosphatidylethanolamine (DOPE), low levels (5-10 mol %) of cationic lipid, and stabilized by a polyethyleneglycol (PEG) coating (Zhang Y. P. et ah, Gene Ther. 1999, 6: 1438-47). Positively charged lipids such as N-[1-(2,3-dioleoyloxi)propyl]-N,N,N-trimethyl-amoniummethylsulfate, or “DOTAP,” are particularly preferred for such particles and vesicles. The preparation of such lipid particles is well known. See, e.g., U.S. Pat. Nos. 4,880,635; 4,906,477; 4,911,928; 4,917,951; 4,920,016; and 4,921,757; each of which is incorporated herein by reference.

[0863] The pharmaceutical composition described herein can be administered or packaged as a unit dose, for example. The term “unit dose” when used in reference to a pharmaceutical composition of the present disclosure refers to physically discrete units suitable as unitary dosage for the subject, each unit containing a predetermined quantity of active material calculated to produce the desired therapeutic effect in association with the required diluent; i.e., carrier, or vehicle.

[0864] Further, the pharmaceutical composition can be provided as a pharmaceutical kit comprising (a) a container containing a compound of the invention in lyophilized form and (b) a second container containing a pharmaceutically acceptable diluent (e.g., sterile used for reconstitution or dilution of the lyophilized compound of the invention. Optionally associated with such container(s) can be a notice in the form prescribed by a governmental agency regulating the manufacture, use or sale of pharmaceuticals or biological products, which notice reflects approval by the agency of manufacture, use or sale for human administration.

[0865] In another aspect, an article of manufacture containing materials useful for the treatment of the diseases described above is included. In some embodiments, the article of manufacture comprises a container and a label. Suitable containers include, for example, bottles, vials, syringes, and test tubes. The containers can be formed from a variety of materials such as glass or plastic. In some embodiments, the container holds a composition that is effective for treating a disease described herein and can have a sterile access port. For example, the container can be an intravenous solution bag or a vial having a stopper pierceable by a hypodermic injection needle. The active agent in the composition is a compound of the invention. In some embodiments, the label on or associated with the container indicates that the composition is used for treating the disease of choice. The article of manufacture can further comprise a second container comprising a pharmaceutically-acceptable buffer, such as phosphate-buffered saline, Ringer's solution, or dextrose solution. It can further include other materials desirable from a commercial and user standpoint, including other buffers, diluents, filters, needles, syringes, and package inserts with instructions for use.

[0866] In some embodiments, any of the fusion proteins, gRNAs, complexes, and/or cells described herein are provided as part of a pharmaceutical composition. In some embodiments, the pharmaceutical composition comprises any of the fusion proteins provided herein. In some embodiments, the pharmaceutical composition comprises any of the complexes provided herein. In some embodiments, the pharmaceutical composition comprises a ribonucleoprotein complex comprising an RNA-guided nuclease (e.g., Cas9) that forms a complex with a gRNA and a cationic lipid. In some embodiments, the pharmaceutical composition comprises a gRNA, a nucleic acid programmable DNA binding protein, a cationic lipid, and a pharmaceutically acceptable excipient. In some embodiments, the pharmaceutical composition comprises cells edited by the products, systems and methods described herein. Pharmaceutical compositions can optionally comprise one or more additional therapeutically active substances.

### Methods of Treating a Genetic Disease

[0867] Provided also are methods of treating a pathogenic mutation associated with a genetic disease that comprise administering to a subject (e.g., a mammal, such as a human) a therapeutically effective amount of a pharmaceutical composition that comprises a polynucleotide encoding a base editor system (e.g., base editor and gRNA) described herein. In an embodiment, the genetic disease is alpha-1 antitrypsin deficiency (A1AD). In some embodiments, the base editor is a fusion protein that comprises a polynucleotide programmable DNA binding domain and an adenosine deaminase domain. A cell of the subject is transduced with the base editor and one or more guide polynucleotides that target the base editor to effect an A•T to G•C alteration (if the cell is transduced with an adenosine deaminase domain) of a nucleic acid sequence containing mutations relative to a wild-type sequence.

[0868] The methods herein include administering to the subject (including a subject identified as being in need of such treatment, or a subject suspected of being at risk of disease and in need of such treatment) an effective amount of a composition described herein. Identifying a subject in need of such treatment can be in the judgment of a subject or a health care professional and can be subjective (e.g. opinion) or objective (e.g. measurable by a test or diagnostic method).

[0869] The therapeutic methods, in general, comprise administration of a therapeutically effective amount of a pharmaceutical composition comprising, for example, a vector encoding a base editor and a gRNA that targets a gene of interest of a subject (e.g., a human patient) in need thereof. Such treatment will be suitably administered to a subject, particularly a human subject, suffering from, having, susceptible to, or at risk for a genetic disease. In an embodiment, the genetic disease is alpha-1 antitrypsin deficiency (A1AD).

[0870] In one embodiment, a method of monitoring treatment progress is provided. The method includes the step of determining a level of diagnostic marker (Marker) (e.g., SNP associated with a disease) or diagnostic measurement (e.g., screen, assay) in a subject suffering from or susceptible to a disorder or symptoms thereof associated with a pathogenic mutation in which the subject has been administered a therapeutic amount of a composition herein sufficient to treat the disease or symptoms thereof. The level of Marker determined in the method can be compared to known levels of Marker in either healthy normal controls or in other afflicted patients to establish the subject's disease status. In preferred embodiments, a second level of Marker in the subject is determined at a time point later than the determination of the first level, and the two levels are compared to monitor the course of disease or the efficacy of the therapy. In certain preferred embodiments, a pre-treatment level of Marker in the subject is determined prior to beginning treatment according to this invention; this pre-treatment level of Marker can then be compared to the level of Marker in the subject after the treatment commences, to determine the efficacy of the treatment.

[0871] In some embodiments, compositions provided herein are administered to a subject, for example, to a human subject, in order to effect a targeted genomic modification within the subject. In an embodiment, the genomic modification is as described in Example 3 herein and the genetic disease is alpha-1 antitrypsin deficiency (A1AD). In some embodiments, cells are obtained from the subject and contacted with any of the pharmaceutical compositions provided herein. In some embodiments, cells removed from a subject and contacted ex vivo with a pharmaceutical composition are re-introduced into the subject, optionally after the desired genomic modification has been effected or detected in the cells. Methods of delivering pharmaceutical compositions comprising nucleases are known, and are described, for example, in U.S. Pat. Nos. 6,453,242; 6,503,717; 6,534,261; 6,599,692; 6,607,882; 6,689,558; 6,824,978; 6,933,113; 6,979,539; 7,013,219; and 7,163,824, the disclosures of all of which are incorporated by reference herein in their entireties. Although the descriptions of pharmaceutical compositions provided herein are principally directed to pharmaceutical compositions which are suitable for administration to humans, it will be understood by the skilled artisan that such compositions are generally suitable for administration to animals or organisms of all sorts, for example, for veterinary use.

[0872] Modification of pharmaceutical compositions suitable for administration to humans in order to render the compositions suitable for administration to various animals is well understood, and the ordinarily skilled veterinary pharmacologist can design and/or perform such modification with merely ordinary, if any, experimentation. Subjects to which administration of the pharmaceutical compositions is contemplated include, but are not limited to, humans and/or other primates; mammals, domesticated animals, pets, and commercially relevant mammals such as cattle, pigs, horses, sheep, cats, dogs, mice, and/or rats; and/or birds, including commercially relevant birds such as chickens, ducks, geese, and/or turkeys.

[0873] Formulations of the pharmaceutical compositions described herein can be prepared by any method known or hereafter developed in the art of pharmacology. In general, such preparatory methods include the step of bringing the active ingredient(s) into association with an excipient and/or one or more other accessory ingredients, and then, if necessary and/or desirable, shaping and/or packaging the product into a desired single- or multi-dose unit. Pharmaceutical formulations can additionally comprise a pharmaceutically acceptable excipient, which, as used herein, includes any and all solvents, dispersion media, diluents, or other liquid vehicles, dispersion or suspension aids, surface active agents, isotonic agents, thickening or emulsifying agents, preservatives, solid binders, lubricants and the like, as suited to the particular dosage form desired. Remington's The Science and Practice of Pharmacy, 21st Edition, A. R. Gennaro (Lippincott, Williams & Wilkins, Baltimore, Md., 2006; incorporated in its entirety herein by reference) discloses various excipients used in formulating pharmaceutical compositions and known techniques for the preparation thereof. See also PCT application PCT/US2010/055131 (Publication number WO2011/053982 A8, filed Nov. 2, 2010), incorporated in its entirety herein by reference, for additional suitable methods, reagents, excipients and solvents for producing pharmaceutical compositions comprising a nuclease.

[0874] Except insofar as any conventional excipient medium is incompatible with a substance or its derivatives, such as by producing any undesirable biological effect or otherwise interacting in a deleterious manner with any other component(s) of the pharmaceutical composition, its use is contemplated to be within the scope of this disclosure.

[0875] The compositions, as described above, can be administered in effective amounts. The effective amount will depend upon the mode of administration, the particular condition being treated, and the desired outcome. It may also depend upon the stage of the condition, the age and physical condition of the subject, the nature of concurrent therapy, if any, and like factors well-known to the medical practitioner. For therapeutic applications, it is that amount sufficient to achieve a medically desirable result.

### Kits

[0876] Various aspects of this disclosure provide kits comprising a base editor system. In one embodiment, the kit comprises a nucleic acid construct comprising a nucleotide sequence encoding a nucleobase editor fusion protein. The fusion protein comprises a deaminase (e.g., adenine deaminase) and a nucleic acid programmable DNA binding protein (napDNAbp). In some embodiments, the kit comprises at least one guide RNA capable of targeting a nucleic acid molecule of interest. In some embodiments, the kit comprises a nucleic acid construct comprising a nucleotide sequence encoding at least one guide RNA. In some embodiments, the kit comprises cells edited by the base editor products, systems and methods described herein. In some embodiments, the kit comprises any of the pharmaceutical compositions as described herein. In certain embodiments, the kit is useful for conditioning a subject for transplantation or engraftment.

[0877] The kit provides, in some embodiments, instructions for using the kit to edit one or more mutations, which may be associated with a disease, pathology, disorder, or condition. The instructions will generally include information about the use of the kit for editing nucleic acid molecules. In other embodiments, the instructions include at least one of the following: precautions; warnings; clinical studies; and/or references. The instructions may be printed directly on the container (when present), or as a label applied to the container, or as a separate sheet, pamphlet, card, or folder supplied in or with the container. In a further embodiment, a kit can comprise instructions in the form of a label or separate insert (package insert) for suitable operational parameters. In yet another embodiment, the kit can comprise one or more containers with appropriate positive and negative controls or control samples, to be used as standard(s) for detection, calibration, or normalization. The kit can further comprise a second container comprising a pharmaceutically-acceptable buffer, such as (sterile) phosphate-buffered saline, Ringer's solution, or dextrose solution. It can further include other materials desirable from a commercial and user standpoint, including other buffers, diluents, filters, needles, syringes, and package inserts with instructions for use.

### EXAMPLES

[0878] The following examples are provided for illustrative purposes only and are not intended to limit the scope of the claims provided herein.

### Example 1. PAM Variant Validation in Base Editors

[0879] Novel CRISPR systems and PAM variants enable base editors (e.g., ABE9 listed in Tables 14 and 18) to edit mutations present in a polynucleotide of interest. Several novel PAM variants have been evaluated and validated. Details of PAM evaluations and base editors are described, for example, in International PCT Application Nos. PCT/2017/045381 (WO2018/027078) and PCT/US2016/058344 (WO2017/070632), each of which is incorporated herein by reference in its entirety. Also see Komor, A. C., et al., “Programmable editing of a target base in genomic DNA without double-stranded DNA cleavage” Nature 533, 420-424 (2016); Gaudelli, N. M., et al., “Programmable base editing of A•T to G•C in genomic DNA without DNA cleavage” Nature 551, 464-471 (2017); and Komor, A. C., et al., “Improved base excision repair inhibition and bacteriophage Mu Gam protein yields C:G-to-T:A base editors with higher efficiency and product purity” Science Advances 3:eaao4774 (2017), the entire contents of each of which are hereby incorporated by reference.

### Example 2. Gene Editing Using ABE8 or ABE9

[0880] To generate ABE9 base editors, a synthetic library was generated starting with ABE8.20 (Heterodimer_(WT)+(TadA*7.10+Q154R) as template comprising all possible amino acid substitutions at a multitude of positions in ABE8.20. For selection, 4 sites were targeted at once for A to G base editing, thereby permiting viability and growth under 4 different selection conditions. Base Editors described in Table 14 were used in conjunction with the gRNAs provided below to edit a target polynucleotide comprising an alteration in human HEK293 cells. Exemplary target sequences follow:

HRB03
GCTGGCAGCAAGGGCGGCGCTGG
HRB04
GCAGCCGCACCCTCAAGCAACGG
HRB08
GTAGCTGACTCACTGCTAGCTGG
HRB12
GAGTCCGAGCAGAAGAAGAAGGG
ng-424
GATGAGAAGGAGAAGTTCTTAGG

[0881] A guide RNA selected from among the following was used to target a polynucleotide of interest:

HRB03
5′-GCUGGCAGCAAGGGCGGCGCUGG-3′
HRB04
GCAGCCGCACCCUCAAGCAACGG
HRB08
GUAGCUGACUCACUGCUAGCUGG
HRB12
GAGUCCGAGCAGAAGAAGAAGGG
ng-424
GAUGAGAAGGAGAAGUUCUUAGG

The A>G editing activity of adenosine base editors in complex with the above-referenced gRNAs was tested. The A>G editing activity of activity of ABE9.1-ABE9.58 (pNMG-B531-634) is shown at FIG. 1 and FIG. 2. The alterations relative to ABE7*10 in each of the ABE9 editors is provided at Table 14 and Table 18. The activity of ABE8.32, ABE8.33, ABE8.39, and ABE8.40 was also tested. ABE8.32, which is a monomer, included the following alterations: V82S+Q154R+Y147R+Y123H (pNMG-B433). ABE8.33 (pNMG-B434), which is a monomer included the following alterations: Q154R+Y147R+Y123H+I76Y V82S, ABE8.39 (pNMG-B440), which is a dimer, included the following alterations: V82S+Q154R+Y147R+Y123H, ABE8.40 (pNMG-B441), which is a dimer, included the following alterations: Q154R+Y147R+Y123H+I76Y+V82S. The results of this testing are quantified in FIGS. 1 and 2, which refer to the adenosine base editors by their plasmid number.

### Example 3. Correction of Alpha-1-Anti-Trypsin Deficiency (A1AD) Mutation with ABE9

[0882] Alpha-1 antitrypsin deficiency (A1AD) is a disease that affects the liver (hepatocytes) and is genetically inherited in an autosomal co-dominant manner. Alpha-1 antitrypsin (A1AT) is a glycoprotein protease inhibitor encoded by the SERPINA1 gene on human chromosome 14. A1AT is synthesized mainly in the liver and is secreted into the bloodstream; typical serum concentrations of A1AT in healthy adults is 1.5-3.0 g/L (20-52 μmon). From the blood, A1AT diffuses into the lung interstitium and alveolar lining fluid, where it inactivates neutrophil elastase and protects lung tissue from protease-mediated damage.

[0883] Over 100 genetic variants of the SERPINA1 gene have been described, but not all are associated with disease. The alphabetic designation of these genetic variants is based on their speed of migration on gel electrophoresis. The most common variant is the M (medium mobility) allele (PiM), and the two most frequent deficiency alleles are PiS and PiZ (the latter having the slowest rate of migration). Several mutations have been described that produce no measurable serum protein; these are referred to as “null” alleles. The most common genotype is MM, which produces normal serum levels of alpha-1 antitrypsin. Most individuals with severe deficiency are homozygous for the Z allele (ZZ). More than 60,000 patients with A1AD in the United States have the severe ZZ phenotype. The Z protein misfolds and polymerizes during its production in the endoplasmic reticulum of hepatocytes; these abnormal polymers are trapped in the liver, greatly reducing the serum levels of A1AT. Deficient or unstable A1AT production causes liver and/or lung pathologies in patients afflicted with A1AD. The liver disease seen in patients with A1AD is caused by the accumulation of abnormal A1AT protein in hepatocytes and the consequent cellular responses, including autophagy, endoplasmic reticulum stress response and apoptosis. Reduced circulating levels of A1AT lead to increased neutrophil elastase activity in the lungs. The imbalance of protease and antiprotease results in the lung disease associated with this pathology.

[0884] A1AD can predispose patients to hepatocellular carcinoma. Although the homozygous ZZ genotype is necessary for liver disease to develop, a heterozygous Z mutation can act as a genetic modifier for other diseases by conferring a greater risk of more severe liver disease, such as in hepatitis C infection and cystic fibrosis liver disease.

[0885] The two most common clinical variants of A1AD are E264V (PiS) and E342K (PiZ) alleles. The clinical single nucleotide variant E342K (PiZ) leads to unstable and/or inactive A1AT protein and, as a consequence, causes liver and lung toxicities. Inheritance is autosomal co-dominant. More than a half of A1AD patients harbor at least one copy of the mutation E342K.

Correction of pathogenic mutations

| | | Pathogenic | Base | gRNA | |
|---|---|---|---|---|---|
| | Gene | Mutation | Editor | Targeting Sequence | PAM |
| 1. | SERPINA1 | E342K | ABE | GACAAGAAAGGGACUGAAGC | NGC |
| 2. | SERPINA1 | E342K | ABE | AUCGACAAGAAAGGGACUGA | NGC |
| 3. | SERPINC1 | R48C (R79C) | ABE | ACACACCGGUUGGUGGCCUC | NGG |

[0886] The base editors and base editor systems comprising ABE9 as described herein, e.g., Tables 14 and 18, and FIGS. 3A-3C, are particularly useful in correcting the pathogenic mutation in the SERPINA1 gene, such as E342K (PiZ allele). In a particular example, the A at position 7 is edited to G to restore PiZ allele to a wild type allele. (FIG. 4A).

[0887] In this Example, selected ABE9 constructs, e.g., as shown in FIGS. 3A-3C and 4B, were assessed for base editing activity in HEK293 cells expressing A1A•T comprising an E342K mutation (HEK293T-E342K). In experiments, HEK293T-E342K cells were transiently transfected with a high efficiency, low toxicity DNA transfection reagent optimized for HEK293 cells, Minis TransIT293 in a 3 μl:1 μg ratio using 250 ng of gRNA plasmid and 750 ng of plasmid encoding the TadA deaminase variant, e.g., TadA*9 (FIG. 4B). The HEK293T-E342K cells were transfected by electroporation (Neon electroporation) using 2.5 μg ABE9 mRNA and 1000 ng gRNA [191] having a length of 20 nucleotides (nt). The gRNA backbone (scaffold) provided as sgRNA for spCas9 base editors is as follows:

5′-GUUUUAGAGC UAGAAAUAGC AAGUUAAAAU AAGGCUAGUC CGUUAUCAAC UUGAAAAAGU GGCACCGAGU CGGUGCUUUU-3′. Another gRNA scaffold provided as sgRNA for spCas9 base editors is as follows: 5′-GUUUUAGAGC UAGAAAUAGC AAGUUAAAAU AAGGCUAGUC CGUUAUCAAC UUGAAAAAGU GGGACCGAGU CGGUGCUUUU-3′. In an embodiment, the terminal uracils (U) of above gRNA scaffolds may optionally comprise “mU*mU*mU*U,” which denote 2′OMe and have phosphorothioate linkages.

[0888] Guide RNAs useful in the described methods include the following:

5′-ACCAUCGACAAGAAAGGGACUGA GUUUUAGAGC UAGAAAUAGC AAGUUAAAAU
AAGGCUAGUC CGUUAUCAAC UUGAAAAAGU GGCACCGAGU CGGUGCUUUU-3′;
5′-CCAUCGACAAGAAAGGGACUGA GUUUUAGAGC UAGAAAUAGC AAGUUAAAAU
AAGGCUAGUC CGUUAUCAAC UUGAAAAAGU GGCACCGAGU CGGUGCUUUU-3′;
5′-CAUCGACAAGAAAGGGACUGA GUUUUAGAGC UAGAAAUAGC AAGUUAAAAU
AAGGCUAGUC CGUUAUCAAC UUGAAAAAGU GGCACCGAGU CGGUGCUUUU-3′;
5′-AUCGACAAGAAAGGGACUGA GUUUUAGAGC UAGAAAUAGC AAGUUAAAAU
AAGGCUAGUC CGUUAUCAAC UUGAAAAAGU GGCACCGAGU CGGUGCUUUU-3′;
5′-UCGACAAGAAAGGGACUGA GUUUUAGAGC UAGAAAUAGC AAGUUAAAAU
AAGGCUAGUC CGUUAUCAAC UUGAAAAAGU GGCACCGAGU CGGUGCUUUU-3′;
5′-CGACAAGAAAGGGACUGA GUUUUAGAGC UAGAAAUAGC AAGUUAAAAU
AAGGCUAGUC CGUUAUCAAC UUGAAAAAGU GGCACCGAGU CGGUGCUUUU-3′

[0889] Following plasmid transfections (after four days) and RNA electroporation (after two days), genomic DNA was extracted with a simple lysis buffer of 0.05% SDS, 25 μg/ml proteinase K, 10 mM Tris pH 8.0, followed by a heat inactivation at 85° C. Genomic sites were PCR amplified and sequenced on a MiSeq. Results were analyzed as previously described and practiced by those skilled in the art for base frequencies at each position and for percent indels. Details of indel calculations are described in International PCT Application Nos. PCT/2017/045381 and PCT/US2016/058344, each of which is incorporated herein by reference for its entirety. Also, see Komor, A. C., et al., “Programmable editing of a target base in genomic DNA without double-stranded DNA cleavage” Nature 533, 420-424 (2016); Gaudelli, N. M., et al., “Programmable base editing of A•T to G•C in genomic DNA without DNA cleavage” Nature, 551, 464-471 (2017); and Komor, A. C., et al., “Improved base excision repair inhibition and bacteriophage Mu Gam protein yields C:G-to-T:A base editors with higher efficiency and product purity” Science Advances 3:eaao4774 (2017), the entire contents of which are hereby incorporated by reference.

[0890] The base editing activity of the ABE9 base editors (FIGS. 3A-3C and 4B) was assayed in HEK293T-E342K cells using guide RNAs of 19- or 20-nucleotides in length. The gRNAs were produced by different manufacturers, namely, AxoLabs, Germany and Synthego, Menlo Park, Calif. As shown in FIGS. 4C and 4D, base editors comprising TadA deaminase variants comprising a V82T mutation showed a high level of efficiency and specificity relative to a control editor (AVT686) and provide data and results related to produing improved rates of nucleobase correction in primary PiZZ fibroblasts through continued editor engineering. FIG. 5A presents a graph showing specific base editing of the target allele versus bystander editing in total liver gDNA using base editors containing TadA* deaminase variants such as those shown in FIG. 4B, in particular, variants 8 and 9, delivered by LNP. FIG. 5B presents a graph of data and results related to the increase in serum A1A•T produced by lipid nanoparticle (LNP)-mediated delivery and base editing in NSG-PiZ transgenic mice using base editors containing TadA* deaminase variants such as those shown in FIG. 4B, in particular, variants 8 and 9.

[0891] In various experiments, plasmids (e.g., mRNA plasmids) encoding a ABE9 base editor comprising a TadA*9 adenosine deaminase variant component including certain mutations, such as described herein, and a Cas9 component, e.g., an SpCas9 variant component, including amino acid mutations that confer the ability of the Cas9 protein (e.g., SpCas9) to bind 5′-NGC-3′ PAMs, were used as shown in FIGS. 3A-3C and as follows:

[0892] monoTadA*7.10 having mutations I76Y+V82T+Y147T+Q154S+A109S and spCas9 having mutations I322V, S409I, E427G, R654L, R753G (MQKFRAER);

[0893] monoTadA*7.10 having mutations I76Y+V82T+Y147T+Q154S+T111R and spCas9 having mutations I322V, S409I, E427G, R654L, R753G (MQKFRAER);

[0894] monoTadA*7.10 having mutations I76Y+V82T+Y147T+Q154S+D119N and spCas9 having mutations I322V, S409I, E427G, R654L, R753G (MQKFRAER);

[0895] monoTadA*7.10 having mutations I76Y+V82T+Y147T+Q154S+H122N and spCas9 having mutations I322V, S409I, E427G, R654L, R753G (MQKFRAER);

[0896] monoTadA*7.10 having mutations I76Y+V82T+Y147d+Q154S and spCas9 having mutations I322V, S409I, E427G, R654L, R753G (MQKFRAER);

[0897] monoTadA*7.10 having mutations I76Y+V82T+Y147T+Q154S+F149Y and spCas9 having mutations I322V, S409I, E427G, R654L, R753G (MQKFRAER);

[0898] monoTadA*7.10 having mutations I76Y+V82T+Y147T+Q154S+T166I and spCas9 having mutations I322V, S409I, E427G, R654L, R753G (MQKFRAER); and

[0899] monoTadA*7.10 having mutations I76Y+V82T+Y147T+Q154S+D167N and spCas9 having mutations I322V, S409I, E427G, R654L, R753G (MQKFRAER).

[0900] mono TadA*7.10 having mutations I76Y+V82T+Y147T+Q154S+L36H+N157K and spCas9 having mutations I322V, S409I, E427G, R654L, R753G, R1114G (MQKFRAER);

[0901] mono TadA*7.10 having mutations I76Y+V82T+Y147D+Q154S+F149Y+D167N+L36H+N157K and SpCas9 having mutations I322V, S409I, E427G, R654L, R753G, R1114G, MQKFRAER;

[0902] monoTadA*7.10 having mutations I76Y+V82T+Y147D+Q154S+F149Y+D167N+L36H+N157K+V106W and SpCas9 having mutations I322V, S409I, E427G, R654L, R753G, R1114G, MQKFRAER

[0903] mono ABE9e: TadA*7.10 having mutations A109S+T111R+D119N+H122N+Y147D+F149Y+T166I+D167N and SpCas9 having mutations I322V, S409I, E427G, R654L, R753G, R1114G, MQKFRAER; and

[0904] mono ABE9e: TadA*7.10 having mutations A109S+T111R+D119N+H122N+Y147D+F149Y+T166I+D167N+V106W and SpCas9 having mutations I322V, S409I, E427G, R654L, R753G, R1114G, MQKFRAER.

[0905] ABE9 base editors also provided precise editing (i.e., A•T to G•C conversion) for the on-target adenine (A) base versus the bystander A and enables highly efficient, therapeutically relevant editing at the A1AD target site. Precise mutation correction via base editing of E342K using ABE9, for example, offers the ability to restore circulating AAT levels (e.g., to levels above 5-15 μM) and to improve both lung and liver function in subjects afflicted with A1AD. In embodiments, the ABE9 base editor may be introduced into cells or administered by lipid nanoparticle (LNP)-mediated delivery to increase serum A1AT base editing, e.g., in NSG-PiZ transgenic mice.

### Example 4. Materials and Methods

[0906] The results provided in the Examples described herein were obtained using the following materials and methods.

[0907] ABEs useful in the invention have one or more of the following amino acid alterations relative to ABE7*10 (the amino acid sequence of ABE7*10 as described supra): R21N, R23H, E25F, N38G, L51W, P54C, M70V, Q71M, N72K, Y73S, V82T, M94V, P124W, T133K, D139L, D139M, C146R, and A158K.

[0908] Adenosine deaminase domains useful in the invention comprise the following combinations of alterations: V82S+Q154R+Y147R; V82S+Q154R+Y123H; V82S+Q154R+Y147R+Y123H; Q154R+Y147R+Y123H+I76Y+V82S; V82S+I76Y; V82S+Y147R; V82S+Y147R+Y123H; V82S+Q154R+Y123H; Q154R+Y147R+Y123H+I76Y; V82S+Y147R; V82S+Y147R+Y123H; V82S+Q154R+Y123H; V82S+Q154R+Y147R; V82S+Q154R+Y147R; Q154R+Y147R+Y123H+I76Y; Q154R+Y147R+Y123H+I76Y+V82S; I76Y V82S Y123H Y147R Q154R; Y147R+Q154R+H123H; and V82S+Q154R.

[0909] Other adenosine deaminase domains useful in the invention comprise the following combinations of alterations: E25F+V82S+Y123H, T133K+Y147R+Q154R; E25F+V82S+Y123H+Y147R+Q154R; L51W+V82S+Y123H+C146R+Y147R+Q154R; Y73S+V82S+Y123H+Y147R+Q154R; P54C+V82S+Y123H+Y147R+Q154R; N38G+V82T+Y123H+Y147R+Q154R; N72K+V82S+Y123H+D139L+Y147R+Q154R; E25F+V82S+Y123H+D139M+Y147R+Q154R; Q71M+V82S+Y123H+Y147R+Q154R; E25F+V82S+Y123H+T133K+Y147R+Q154R; E25F+V82S+Y123H+Y147R+Q154R; V82S+Y123H+P124W+Y147R+Q154R; L51W+V82S+Y123H+C146R+Y147R+Q154R; P54C+V82S+Y123H+Y147R+Q154R; Y73S+V82S+Y123H+Y147R+Q154R; N38G+V82T+Y123H+Y147R+Q154R; R23H+V82S+Y123H+Y147R+Q154R; R21N+V82S+Y123H+Y147R+Q154R; V82S+Y123H+Y147R+Q154R+A158K; N72K+V82S+Y123H+D139L+Y147R+Q154R; E25F+V82S+Y123H+D139M+Y147R+Q154R; and M70V+V82S+M94V+Y123H+Y147R+Q154R Other adenosine deaminases useful in the invention comprise a combination of alterations: Q71M+V82S+Y123H+Y147R+Q154R; E25F+I76Y+V82S+Y123H+Y147R+Q154R; I76Y+V82T+Y123H+Y147R+Q154R; N38G+I76Y+V82S+Y123H+Y147R+Q154R; R23H+I76Y+V82S+Y123H+Y147R+Q154R; P54C+I76Y+V82S+Y123H+Y147R+Q154R; R21N+I76Y+V82S+Y123H+Y147R+Q154R; I76Y+V82S+Y123H+D139M+Y147R+Q154R; Y73S+I76Y+V82S+Y123H+Y147R+Q154R; E25F+I76Y+V82S+Y123H+Y147R+Q154R; I76Y+V82T+Y123H+Y147R+Q154R; N38G+I76Y+V82S+Y123H+Y147R+Q154R; R23H+I76Y+V82S+Y123H+Y147R+Q154R; P54C+I76Y+V82S+Y123H+Y147R+Q154R; R21N+I76Y+V82S+Y123H+Y147R+Q154R; I76Y+V82S+Y123H+D139M+Y147R+Q154R; Y73S+I76Y+V82S+Y123H+Y147R+Q154R; and V82S+Q154R; N72K V82S+Y123H+Y147R+Q154R; Q71M V82S+Y123H+Y147R+Q154R; V82S+Y123H+T133K+Y147R+Q154R; V82S+Y123H+T133K+Y147R+Q154R+A158K; M70V+Q71M+N72K+V82S+Y123H+Y147R+Q154R; N72K V82S+Y123H+Y147R+Q154R; Q71M V82S+Y123H+Y147R+Q154R; M70V+V82S+M94V+Y123H+Y147R+Q154R; V82S+Y123H+T133K+Y147R+Q154R; V82S+Y123H+T133K+Y147R+Q154R+A158K; and M70V+Q71M+N72K+V82S+Y123H+Y147R+Q154R. In some embodiments, the adenosine deaminase is expressed as a monomer. In other embodiments, the adenosine deaminase is expressed as a heterodimer.

[0910] The following table provides a description of vectors useful in the methods of the invention.

TABLE 18

| ABE9 Plasmid | | | | Plasmid | | |
|---|---|---|---|---|---|---|
| Name | ABE9 Description | Amino Acid Alterations | Maintenance | Origin | Promoter | Vector Type |
| pNMG-B433 | ABE8.32 | monomer_V82S + Q154R + | Carb | pBR322 | CMV | mammalian |
| | | Y147R + Y123H | | | | expression |
| | | | | | | vector |
| pNMG-B434 | ABE8.33 | monomer_Q154R + Y147R + | Carb | pBR322 | CMV | mammalian |
| | | Y123H + I76Y V82S | | | | expression |
| | | | | | | vector |
| pNMG-B440 | ABE8.39 | dimer_V82S + Q154R + | Carb | pBR322 | CMV | mammalian |
| | | Y147R + Y123H | | | | expression |
| | | | | | | vector |
| pNMG-B441 | ABE8.40 | dimer_Q154R + Y147R + | Carb | pBR322 | CMV | mammalian |
| | | Y123H + I76Y + V82S | | | | expression |
| | | | | | | vector |
| pNMG-B503 | ABEmax | published codon usage sequence | Carb | pBR322 | CMV | mammalian |
| | | | | | | expression |
| | | | | | | vector |
| pNMG-B504 | ABEmax(no BPNLS) | no BPNLS | Carb | pBR322 | CMV | mammalian |
| | | | | | | expression |
| | | | | | | vector |
| pNMG-B531 | ABE9.1 (also termed | E25F, V82S, Y123H, T133K, | Carb | pBR322 | CMV | mammalian |
| | ABE9.2m)_monomer | Y147R, Q154R | | | | expression |
| | | | | | | vector |
| pNMG-B532 | ABE9.2 (also | E25F, V82S, Y123H, Y147R, | Carb | pBR322 | CMV | mammalian |
| | termed)_monomer | Q154R | | | | expression |
| | | | | | | vector |
| pNMG-B533 | ABE9.3 (also | V82S, Y123H, P124W, Y147R, | Carb | pBR322 | CMV | mammalian |
| | termed)_monomer | Q154R | | | | expression |
| | | | | | | vector |
| pNMG-B534 | ABE9.4 (also termed | L51W, V82S, Y123H, C146R, | Carb | pBR322 | CMV | mammalian |
| | ABE9.5m)_monomer | Y147R, Q154R | | | | expression |
| | | | | | | vector |
| pNMG-B535 | ABE9.5 (also termed | P54C, V82S, Y123H, Y147R, | Carb | pBR322 | CMV | mammalian |
| | ABE9.6m)_monomer | Q154R | | | | expression |
| | | | | | | vector |
| pNMG-B536 | ABE9.6 (also termed | Y73S, V82S, Y123H, Y147R, | Carb | pBR322 | CMV | mammalian |
| | ABE9.7m)_monomer | Q154R | | | | expression |
| | | | | | | vector |
| pNMG-B537 | ABE9.7 (also termed | N38G, V82T, Y123H, Y147R, | Carb | pBR322 | CMV | mammalian |
| | ABE9.8m)_monomer | Q154R | | | | expression |
| | | | | | | vector |
| pNMG-B538 | ABE9.8 (also termed | R23H, V82S, Y123H, Y147R, | Carb | pBR322 | CMV | mammalian |
| | ABE9.9m)_monomer | Q154R | | | | expression |
| | | | | | | vector |
| pNMG-B539 | ABE9.9 (also termed | R21N, V82S, Y123H, Y147R, | Carb | pBR322 | CMV | mammalian |
| | ABE9.11m)_monomer | Q154R | | | | expression |
| | | | | | | vector |
| pNMG-B540 | ABE9.10 (also termed | V82S, Y123H, Y147R, Q154R, | Carb | pBR322 | CMV | mammalian |
| | ABE9.13m)_monomer | A158K | | | | expression |
| | | | | | | vector |
| pNMG-B541 | ABE9.11 (also termed | N72K, V82S, Y123H, D139L, | Carb | pBR322 | CMV | mammalian |
| | ABE9.14m)_monomer | Y147R, Q154R, | | | | expression |
| | | | | | | vector |
| pNMG-B542 | ABE9.12 (also termed | E25F, V82S, Y123H, D139M, | Carb | pBR322 | CMV | mammalian |
| | ABE9.15m)_monomer | Y147R, Q154R | | | | expression |
| | | | | | | vector |
| pNMG-B543 | ABE9.13 (also termed | M70V, V82S, M94V, Y123H, | Carb | pBR322 | CMV | mammalian |
| | ABE9.16m)_monomer | Y147R, Q154R | | | | expression |
| | | | | | | vector |
| pNMG-B544 | ABE9.14 (also termed | Q71M, V82S, Y123H, Y147R, | Carb | pBR322 | CMV | mammalian |
| | ABE9.17m)_monomer | Q154R | | | | expression |
| | | | | | | vector |
| pNMG-B545 | ABE9.15 (also termed | E25F, V82S, Y123H, T133K, | Carb | pBR322 | CMV | mammalian |
| | ABE9.2d)_heterodimer | Y147R, Q154R | | | | expression |
| | | | | | | vector |
| pNMG-B546 | ABE9.16 (also termed | E25F, V82S, Y123H, Y147R, | Carb | pBR322 | CMV | mammalian |
| | ABE9.3d)_heterodimer | Q154R | | | | expression |
| | | | | | | vector |
| pNMG-B547 | ABE9.17 (also termed | V82S, Y123H, P124W, Y147R, | Carb | pBR322 | CMV | mammalian |
| | ABE9.4d)_heterodimer | Q154R | | | | expression |
| | | | | | | vector |
| pNMG-B548 | ABE9.18 (also termed | L51W, V82S, Y123H, C146R, | Carb | pBR322 | CMV | mammalian |
| | ABE9.5d)_heterodimer | Y147R, Q154R | | | | expression |
| | | | | | | vector |
| pNMG-B549 | ABE9.19 (also termed | P54C, V82S, Y123H, Y147R, | Carb | pBR322 | CMV | mammalian |
| | ABE9.6d)_heterodimer | Q154R | | | | expression |
| | | | | | | vector |
| pNMG-B550 | ABE9.20 (also termed | Y73S, V82S, Y123H, Y147R, | Carb | pBR322 | CMV | mammalian |
| | ABE9.7d)_heterodimer | Q154R | | | | expression |
| | | | | | | vector |
| pNMG-B551 | ABE9.21 (also termed | N38G, V82T, Y123H, Y147R, | Carb | pBR322 | CMV | mammalian |
| | ABE9.8d)_heterodimer | Q154R | | | | expression |
| | | | | | | vector |
| pNMG-B552 | ABE9.22 (also termed | R23H, V82S, Y123H, Y147R, | Carb | pBR322 | CMV | mammalian |
| | ABE9.9d)_heterodimer | Q154R | | | | expression |
| | | | | | | vector |
| pNMG-B553 | ABE9.23 (also termed | R21N, V82S, Y123H, Y147R, | Carb | pBR322 | CMV | mammalian |
| | ABE9.11d)_heterodimer | Q154R | | | | expression |
| | | | | | | vector |
| pNMG-B554 | ABE9.24 (also termed | V82S, Y123H, Y147R, Q154R, | Carb | pBR322 | CMV | mammalian |
| | ABE9.13d)_heterodimer | A158K | | | | expression |
| | | | | | | vector |
| pNMG-B555 | ABE9.25 (also termed | N72K, V82S, Y123H, D139L, | Carb | pBR322 | CMV | mammalian |
| | ABE9.14d)_heterodimer | Y147R, Q154R, | | | | expression |
| | | | | | | vector |
| pNMG-B556 | ABE9.26 (also termed | E25F, V82S, Y123H, D139M, | Carb | pBR322 | CMV | mammalian |
| | ABE9.15d)_heterodimer | Y147R, Q154R | | | | expression |
| | | | | | | vector |
| pNMG-B557 | ABE9.27 (also termed | M70V, V82S, M94V, Y123H, | Carb | pBR322 | CMV | mammalian |
| | ABE9.16d)_heterodimer | Y147R, Q154R | | | | expression |
| | | | | | | vector |
| pNMG-B558 | ABE9.28 (also termed | Q71M, V82S, Y123H, Y147R, | Carb | pBR322 | CMV | mammalian |
| | ABE9.17d)_heterodimer | Q154R | | | | expression |
| | | | | | | vector |
| pNMG-B559 | ABE9.29_monomer | E25F_I76Y_V82S_Y123H_Y147R_Q154R | Carb | pBR322 | CMV | mammalian |
| | | | | | | expression |
| | | | | | | vector |
| pNMG-B560 | ABE9.30_monomer | I76Y_V82T_Y123H_Y147R_Q154R | Carb | pBR322 | CMV | mammalian |
| | | | | | | expression |
| | | | | | | vector |
| pNMG-B561 | ABE9.31_monomer | N38G_I76Y_V82S_Y123H_Y147R_Q154R | Carb | pBR322 | CMV | mammalian |
| | | | | | | expression |
| | | | | | | vector |
| pNMG-B562 | ABE9.32_monomer | N38G_I76Y_V82T_Y123H_Y147R_Q154R | Carb | pBR322 | CMV | mammalian |
| | | | | | | expression |
| | | | | | | vector |
| pNMG-B563 | ABE9.33_monomer | R23H_I76Y_V82S_Y123H_Y147R_Q154R | Carb | pBR322 | CMV | mammalian |
| | | | | | | expression |
| | | | | | | vector |
| pNMG-B564 | ABE9.34_monomer | P54C_I76Y_V82S_Y123H_Y147R_Q154R | Carb | pBR322 | CMV | mammalian |
| | | | | | | expression |
| | | | | | | vector |
| pNMG-B565 | ABE9.35_monomer | R21N_I76Y_V82S_Y123H_Y147R_Q154R | Carb | pBR322 | CMV | mammalian |
| | | | | | | expression |
| | | | | | | vector |
| pNMG-B566 | ABE9.36_monomer | I76Y_V82S_Y123H_D138M_Y147R_Q154R | Carb | pBR322 | CMV | mammalian |
| | | | | | | expression |
| | | | | | | vector |
| pNMG-B567 | ABE9.37_monomer | Y72S_I76Y_V82S_Y123H_Y147R_Q154R | Carb | pBR322 | CMV | mammalian |
| | | | | | | expression |
| | | | | | | vector |
| pNMG-B568 | ABE9.38_heterodimer | E25F_I76Y_V82S_Y123H_Y147R_Q154R | Carb | pBR322 | CMV | mammalian |
| | | | | | | expression |
| | | | | | | vector |
| pNMG-B569 | ABE9.39_heterodimer | I76Y_V82T_Y123H_Y147R_Q154R | Carb | pBR322 | CMV | mammalian |
| | | | | | | expression |
| | | | | | | vector |
| pNMG-B570 | ABE9.40_heterodimer | N38G_I76Y_V82S_Y123H_Y147R_Q154R | Carb | pBR322 | CMV | mammalian |
| | | | | | | expression |
| | | | | | | vector |
| pNMG-B571 | ABE9.41_heterodimer | N38G_I76Y_V82T_Y123H_Y147R_Q154R | Carb | pBR322 | CMV | mammalian |
| | | | | | | expression |
| | | | | | | vector |
| pNMG-B572 | ABE9.42_heterodimer | R23H_I76Y_V82S_Y123H_Y147R_Q154R | Carb | pBR322 | CMV | mammalian |
| | | | | | | expression |
| | | | | | | vector |
| pNMG-B573 | ABE9.43_heterodimer | P54C_I76Y_V82S_Y123H_Y147R_Q154R | Carb | pBR322 | CMV | mammalian |
| | | | | | | expression |
| | | | | | | vector |
| pNMG-B574 | ABE9.44_heterodimer | R21N_I76Y_V82S_Y123H_Y147R_Q154R | Carb | pBR322 | CMV | mammalian |
| | | | | | | expression |
| | | | | | | vector |
| pNMG-B575 | ABE9.45_heterodimer | I76Y_V82S_Y123H_D138M_Y147R_Q154R | Carb | pBR322 | CMV | mammalian |
| | | | | | | expression |
| | | | | | | vector |
| pNMG-B576 | ABE9.46_heterodimer | Y72S_I76Y_V82S_Y123H_Y147R_Q154R | Carb | pBR322 | CMV | mammalian |
| | | | | | | expression |
| | | | | | | vector |
| pNMG-B623 | ABE9.47_monomer | N72K_V82S, Y123H, Y147R, Q154R | Carb | pBR322 | CMV | mammalian |
| | | | | | | expression |
| | | | | | | vector |
| pNMG-B624 | ABE9.48_monomer | Q71M_V82S, Y123H, Y147R, Q154R | Carb | pBR322 | CMV | mammalian |
| | | | | | | expression |
| | | | | | | vector |
| pNMG-B625 | ABE9.49_monomer | M70V, V82S, M94V, Y123H, | Carb | pBR322 | CMV | mammalian |
| | | Y147R, Q154R | | | | expression |
| | | | | | | vector |
| pNMG-B626 | ABE9.50_monomer | V82S, Y123H, T133K, Y147R, | Carb | pBR322 | CMV | mammalian |
| | | Q154R | | | | expression |
| | | | | | | vector |
| pNMG-B627 | ABE9.51_monomer | V82S, Y123H, T133K, Y147R, | Carb | pBR322 | CMV | mammalian |
| | | Q154R, A158K | | | | expression |
| | | | | | | vector |
| pNMG-B628 | ABE9.52_monomer | M70V, Q71M, N72K, V82S, Y123H, | Carb | pBR322 | CMV | mammalian |
| | | Y147R, Q154R | | | | expression |
| | | | | | | vector |
| pNMG-B629 | ABE9.53_heterodimer | N72K_V82S, Y123H, Y147R, | Carb | pBR322 | CMV | mammalian |
| | | Q154R | | | | expression |
| | | | | | | vector |
| pNMG-B630 | ABE9.54_heterodimer | Q71M_V82S, Y123H, Y147R, | Carb | pBR322 | CMV | mammalian |
| | | Q154R | | | | expression |
| | | | | | | vector |
| pNMG-B631 | ABE9.55_heterodimer | M70V, V82S, M94V, Y123H, | Carb | pBR322 | CMV | mammalian |
| | | Y147R, Q154R | | | | expression |
| | | | | | | vector |
| pNMG-B632 | ABE9.56_heterodimer | V82S, Y123H, T133K, Y147R, | Carb | pBR322 | CMV | mammalian |
| | | Q154R | | | | expression |
| | | | | | | vector |
| pNMG-B633 | ABE9.57_heterodimer | V82S, Y123H, T133K, Y147R, | Carb | pBR322 | CMV | mammalian |
| | | Q154R, A158K | | | | expression |
| | | | | | | vector |
| pNMG-B634 | ABE9.58_heterodimer | M70V, Q71M, N72K, V82S, Y123H, | Carb | pBR322 | CMV | mammalian |
| | | Y147R, Q154R | | | | expression |
| | | | | | | vector |

[0911] In Table 18, novel ABE9 nucleobase editors having alterations relative to an ABE 7*10 reference sequence are shown. The term “monomer” as used in Table 18 refers to a monomeric form of TadA*7.10 comprising the alterations described in Table 18. The term “heterodimer” as used in Table 18 refers to the specified wild-type E. coli TadA fused to TadA*7.10 comprising the alterations described in Table 18.

### Cloning.

[0912] DNA sequences of target polynucleotides and gRNAs and primers used are described herein. For gRNAs, the following scaffold sequence is presented: GUUUUAGAGC UAGAAAUAGC AAGUUAAAAU AAGGCUAGUC CGUUAUCAAC UUGAAAAAGU GGCACCGAGU CGGUGCUUUU. The gRNA encompasses the scaffold sequence and the spacer sequence (target sequence) for polynucleotide comprising a pathogenic mutation as described herein or as determined based on the knowledge of the skilled practitioner and as would be understood to the skilled practitioner in the art.

[0913] Methods for base editing are known in the art. See, e.g., Komor, A. C., et al., “Programmable editing of a target base in genomic DNA without double-stranded DNA cleavage” Nature 533, 420-424 (2016); Gaudelli, N. M., et al., “Programmable base editing of A•T to G•C in genomic DNA without DNA cleavage” Nature 551, 464-471 (2017); Komor, A. C., et al., “Improved base excision repair inhibition and bacteriophage Mu Gam protein yields C:G-to-T:A base editors with higher efficiency and product purity” Science Advances 3:eaao4774 (2017), and Rees, H. A., et al., “Base editing: precision chemistry on the genome and transcriptome of living cells.” Nat Rev Genet. 2018 December; 19(12):770-788. doi: 10.1038/s41576-018-0059-1.

[0914] PCR is performed using VeraSeq ULtra DNA polymerase (Enzymatics), or Q5 Hot Start High-Fidelity DNA Polymerase (New England Biolabs). Base Editor (BE) plasmids were constructed using USER cloning (New England Biolabs). Deaminase genes were synthesized as gBlocks Gene Fragments (Integrated DNA Technologies). Cas9 genes useful in the invention are listed below and described herein. Cas9 genes were obtained from previously reported plasmids. Deaminase and fusion genes were cloned into the vectors described in Table 17 above (E. coli codon-optimized). sgRNA expression plasmids are constructed using site-directed mutagenesis.

[0915] Briefly, primers useful in the invention are 5′ phosphorylated using T4 Polynucleotide Kinase (New England Biolabs) according to the manufacturer's instructions. Next, PCR was performed using Q5 Hot Start High-Fidelity Polymerase (New England Biolabs) with the phosphorylated primers and the plasmid encoding a gene of interest as a template according to the manufacturer's instructions. PCR products were incubated with DpnI (20 U, New England Biolabs) at 37° C. for 1 hour, purified on a QIAprep spin column (Qiagen), and ligated using QuickLigase (New England Biolabs) according to the manufacturer's instructions. DNA vector amplification was carried out using Mach1 competent cells (ThermoFisher Scientific).

In Vitro Deaminase Assay on ssDNA.

[0916] Sequences of all ssDNA substrates are obtained using standard methods. All Cy3-labelled substrates are obtained from Integrated DNA Technologies (IDT). Deaminases are expressed in vitro using the TNT T7 Quick Coupled Transcription/Translation Kit (Promega) according to the manufacturer's instructions using 1 μg of plasmid. Following protein expression, 5 μl of lysate is combined with 35 μl of ssDNA (1.8 μM) and USER enzyme (1 unit) in CutSmart buffer (New England Biolabs) (50 mM potassium acetate, 29 mM Tris-acetate, 10 mM magnesium acetate, 100 μg ml-1 BSA, pH 7.9) and incubated at 37° C. for 2 h. Cleaved U-containing substrates are resolved from full-length unmodified substrates on a 10% TBE-urea gel (Bio-Rad).

### Expression and Purification of Base Editors.

[0917] E. coli BL21 STAR (DE3)-competent cells (ThermoFisher Scientific) are transformed with plasmids (e.g. plasmids encoding the base editors described in Table 17). The resulting expression strains are grown overnight in Luria-Bertani (LB) broth containing 100 μg ml-1 of kanamycin at 37° C. The cells are diluted 1:100 into the same growth medium and grown at 37° C. to OD600=—0.6. The culture is cooled to 4° C. over a period of 2 h, and isopropyl-β-d-1-thiogalactopyranoside (IPTG) is added at 0.5 mM to induce protein expression. After ˜16 h, the cells are collected by centrifugation at 4,000 g and are resuspended in lysis buffer (50 mM tris(hydroxymethyl)-aminomethane (Tris)-HCl (pH 7.5), 1 M NaCl, 20% glycerol, 10 mM tris(2-carboxyethyl)phosphine (TCEP, Soltec Ventures)). The cells are lysed by sonication (20 s pulse-on, 20 s pulse-off for 8 min total at 6 W output) and the lysate supernatant is isolated following centrifugation at 25,000 g for 15 minutes. The lysate is incubated with His-Pur nickel-nitriloacetic acid (nickel-NTA) resin (ThermoFisher Scientific) at 4° C. for 1 hour to capture the His-tagged fusion protein. The resin is transferred to a column and washed with 40 ml of lysis buffer. The His-tagged fusion protein is eluted in lysis buffer supplemented with 285 mM imidazole, and concentrated by ultrafiltration (Amicon-Millipore, 100-kDa molecular weight cut-off) to 1 ml total volume. The protein is diluted to 20 ml in low-salt purification buffer containing 50 mM tris(hydroxymethyl)-aminomethane (Tris)-HCl (pH 7.0), 0.1 M NaCl, 20% glycerol, 10 mM TCEP and is loaded onto SP Sepharose Fast Flow resin (GE Life Sciences). The resin is washed with 40 ml of this low-salt buffer, and the protein is eluted with 5 ml of activity buffer containing 50 mM tris(hydroxymethyl)-aminomethane (Tris)-HCl (pH 7.0), 0.5 M NaCl, 20% glycerol, 10 mM TCEP. The eluted proteins are quantified by SDS-PAGE.

In Vitro Transcription of sgRNAs.

[0918] Linear DNA fragments containing the T7 promoter followed by the 20-bp sgRNA target sequence are transcribed in vitro using the TranscriptAid T7 High Yield Transcription Kit (ThermoFisher Scientific) according to the manufacturer's instructions. sgRNA products are purified using the MEGAclear Kit (ThermoFisher Scientific) according to the manufacturer's instructions and quantified by UV absorbance.

Preparation of Cy3-Conjugated dsDNA Substrates.

[0919] Typically, unlabled sequence strands (e.g. sequences of 80-nt unlabelled strands) are ordered as PAGE-purified oligonucleotides from IDT. A 25-nt Cy3-labelled primer complementary to the 3′ end of each 80-nt substrate is ordered as an HPLC-purified oligonucleotide from IDT. To generate the Cy3-labelled dsDNA substrates, the 80-nt strands (5 μl of a 100 μM solution) are combined with the Cy3-labelled primer (5 μl of a 100 μM solution) in NEBuffer 2 (38.25 μl of a 50 mM NaCl, 10 mM Tris-HCl, 10 mM MgCl₂, 1 mM DTT, pH 7.9 solution, New England Biolabs) with dNTPs (0.75 μl of a 100 mM solution) and heated to 95° C. for 5 min, followed by a gradual cooling to 45° C. at a rate of 0.1° C. per s. After this annealing period, Klenow exo- (5 U, New England Biolabs) is added and the reaction is incubated at 37° C. for 1 h. The solution is diluted with buffer PB (250 μl, Qiagen) and isopropanol (50 μl) and purified on a QIAprep spin column (Qiagen), eluting with 50 μl of Tris buffer.

Deaminase Assay on dsDNA.

[0920] The purified fusion protein (20 μl of 1.9 μM in activity buffer) is combined with 1 equivalent of appropriate sgRNA and incubated at ambient temperature for 5 min. The Cy3-labelled dsDNA substrate is added to final concentration of 125 nM and the resulting solution is incubated at 37° C. for 2 h. The dsDNA is separated from the fusion by the addition of buffer PB (100 μl, Qiagen) and isopropanol (25 μl) and purified on a EconoSpin micro spin column (Epoch Life Science), eluting with 20 μl of CutSmart buffer (New England Biolabs). USER enzyme (1 U, New England Biolabs) is added to the purified, edited dsDNA and incubated at 37° C. for 1 h. The Cy3-labeled strand is fully denatured from its complement by combining 5 μl of the reaction solution with 15 μl of a DMSO-based loading buffer (5 mM Tris, 0.5 mM EDTA, 12.5% glycerol, 0.02% bromophenol blue, 0.02% xylene cyan, 80% DMSO). The full-length C-containing substrate is separated from any cleaved, U-containing edited substrates on a 10% TBE-urea gel (Bio-Rad) and imaged on a GE Amersham Typhoon imager.

Preparation of In Vitro-Edited dsDNA for High-Throughput Sequencing.

[0921] Oligonucleotides are obtained from IDT. Complementary sequences are combined (5 μl of a 100 μM solution) in Tris buffer and annealed by heating to 95° C. for 5 min, followed by a gradual cooling to 45° C. at a rate of 0.1° C. per s to generate 60-bp dsDNA substrates. Purified fusion protein (20 μl of 1.9 μM in activity buffer) is combined with 1 equivalent of appropriate sgRNA and incubated at ambient temperature for 5 min. The 60-mer dsDNA substrate is added to final concentration of 125 nM, and the resulting solution is incubated at 37° C. for 2 h. The dsDNA is separated from the fusion by the addition of buffer PB (100 μl, Qiagen) and isopropanol (25 μl) and purified on a EconoSpin micro spin column (Epoch Life Science), eluting with 20 μl of Tris buffer. The resulting edited DNA (1 μl is used as a template) is amplified by PCR using high-throughput sequencing primer pairs and VeraSeq Ultra (Enzymatics) according to the manufacturer's instructions with 13 cycles of amplification. PCR reaction products are purified using RapidTips (Diffinity Genomics), and the purified DNA is amplified by PCR with primers containing sequencing adapters, purified, and sequenced on a MiSeq high-throughput DNA sequencer (Illumina) as previously described.

### Cell Culture.

[0922] HEK293T (ATCC CRL-3216) and U2OS (ATCC HTB-96) expressing target polynucleotides are maintained in Dulbecco's Modified Eagle's Medium plus GlutaMax (ThermoFisher) supplemented with 10% (v/v) fetal bovine serum (FBS), at 37° C. with 5% CO2. HCC1954 cells (ATCC CRL-2338) are maintained in RPMI-1640 medium (ThermoFisher Scientific) supplemented as described above. Immortalized cells (Taconic Biosciences) are cultured in Dulbecco's Modified Eagle's Medium plus GlutaMax (ThermoFisher Scientific) supplemented with 10% (v/v) fetal bovine serum (FBS) and 200 μg ml-1 Geneticin (ThermoFisher Scientific).

### Transfections.

[0923] HEK293T cells are seeded on 48-well collagen-coated BioCoat plates (Corning) and transfected at approximately 85% confluency. Briefly, 750 ng of BE and 250 ng of sgRNA expression plasmids were transfected using 1.5 μl of Lipofectamine 2000 (ThermoFisher Scientific) per well according to the manufacturer's protocol. HEK293T cells are transfected using appropriate Amaxa Nucleofector II programs according to manufacturer's instructions (V kits using program Q-001 for HEK293T cells).

### High-Throughput DNA Sequencing of Genomic DNA Samples.

[0924] Transfected cells are harvested after 3 days and the genomic DNA is isolated using the Agencourt DNAdvance Genomic DNA Isolation Kit (Beckman Coulter) according to the manufacturer's instructions. On-target and off-target genomic regions of interest were amplified by PCR with flanking high-throughput sequencing primer pair. PCR amplification is carried out with Phusion high-fidelity DNA polymerase (ThermoFisher) according to the manufacturer's instructions using 5 ng of genomic DNA as a template. Cycle numbers were determined separately for each primer pair as to ensure the reaction is stopped in the linear range of amplification. PCR products were purified using RapidTips (Diffinity Genomics). Purified DNA was amplified by PCR with primers containing sequencing adaptors. The products were gel purified and quantified using the Quant-iT PicoGreen dsDNA Assay Kit (ThermoFisher) and KAPA Library Quantification Kit-Illumina (KAPA Biosystems). Samples were sequenced on an Illumina MiSeq as previously described (Pattanayak, Nature Biotechnol. 31, 839-843 (2013)).

### Data Analysis.

[0925] Sequencing reads were automatically demultiplexed using MiSeq Reporter (Illumina), and individual FASTQ files were analysed with a custom Matlab. Each read was pairwise aligned to the appropriate reference sequence using the Smith-Waterman algorithm. Base calls with a Q-score below 31 were replaced with Ns and were thus excluded in calculating nucleotide frequencies. This treatment yields an expected MiS eq base-calling error rate of approximately 1 in 1,000. Aligned sequences in which the read and reference sequence contained no gaps were stored in an alignment table from which base frequencies could be tabulated for each locus. Indel frequencies were quantified with a custom Matlab script using previously described criteria (Zuris, et al., Nature Biotechnol. 33, 73-80 (2015). Sequencing reads were scanned for exact matches to two 10-bp sequences that flank both sides of a window in which indels might occur. If no exact matches were located, the read was excluded from analysis. If the length of this indel window exactly matched the reference sequence the read was classified as not containing an indel. If the indel window was two or more bases longer or shorter than the reference sequence, then the sequencing read was classified as an insertion or deletion, respectively.

### Other Embodiments

[0926] From the foregoing description, it will be apparent that variations and modifications may be made to the invention described herein to adopt it to various usages and conditions. Such embodiments are also within the scope of the following claims.

[0927] The recitation of a listing of elements in any definition of a variable herein includes definitions of that variable as any single element or combination (or subcombination) of listed elements. The recitation of an embodiment herein includes that embodiment as any single embodiment or in combination with any other embodiments or portions thereof.

### INCORPORATION BY REFERENCE

[0928] All publications, patents, and patent applications mentioned in this specification are herein incorporated by reference to the same extent as if each individual publication, patent, or patent application was specifically and individually indicated to be incorporated by reference. Absent any indication otherwise, publications, patents, and patent applications mentioned in this specification are incorporated herein by reference in their entireties.

1. An adenosine deaminase comprising an alteration at an amino acid position selected from the group consisting of 21, 23, 25, 38, 51, 54, 70, 71, 72, 73, 94, 124, 133, 139, 146, and 158 of SEQ ID NO: 1, or a corresponding alteration in another adenosine deaminase:
```
(SEQ ID NO: 1)
                10 20 30 40
MSEVEFSHEY WMRHALTLAK RARDEREVPV GAVLVLNNRV
                50 60 70 80
IGEGWNRAIG LHDPTAHAEI MALRQGGLVM QNYRLIDATL
                90 100 110 120
YVTFEPCVMC AGAMIHSRIG RVVFGVRNAK TGAAGSLMDV
              130 140 150 160
LHYPGMNHRV EITEGILADE GAALLCYFER MPRQVFNAQK
KAQSSTD.
```

2. The adenosine deaminase of claim 1, which comprises an alteration selected from the group consisting of R21N, R23H, E25F, N38G, L51W, P54C, M70V, Q71M, N72K, Y73S, M94V, P124W, T133K, D139L, D139M, C146R, and A158K of SEQ ID NO: 1, or a corresponding alteration in another adenosine deaminase.

3. The adenosine deaminase of claim 1, further comprising a V82T alteration of SEQ ID NO: 1, or a corresponding alteration in another adenosine deaminase.

4-6. (canceled)

7. The adenosine deaminase of claim 1, which further comprises one or more of the following alterations: Y147T, Y147R, Q154S, Y123H, and Q154R.

8. The adenosine deaminase of claim 1, wherein the adenosine deaminase comprises any one of the following groups of alterations:
E25F+V82S+Y123H;
T133K+Y147R+Q154R;
E25F+V82S+Y123H+Y147R+Q154R;
L51W+V82S+Y123H+C146R+Y147R+Q154R;
Y73S+V82S+Y123H+Y147R+Q154R;
P54C+V82S+Y123H+Y147R+Q154R;
N38G+V82T+Y123H+Y147R+Q154R;
N72K+V82S+Y123H+D139L+Y147R+Q154R;
E25F+V82S+Y123H+D139M+Y147R+Q154R;
Q71M+V82S+Y123H+Y147R+Q154R;
E25F+V82S+Y123H+T133K+Y147R+Q154R;
E25F+V82S+Y123H+Y147R+Q154R;
V82S+Y123H+P124W+Y147R+Q154R;
L51W+V82S+Y123H+C146R+Y147R+Q154R;
P54C+V82S+Y123H+Y147R+Q154R;
Y73S+V82S+Y123H+Y147R+Q154R;
N38G+V82T+Y123H+Y147R+Q154R;
R23H+V82S+Y123H+Y147R+Q154R;
R21N+V82S+Y123H+Y147R+Q154R;
V82S+Y123H+Y147R+Q154R+A158K;
N72K+V82S+Y123H+D139L+Y147R+Q154R;
E25F+V82S+Y123H+D139M+Y147R+Q154R;
M70V+V82S+M94V+Y123H+Y147R+Q154R;
Q71M+V82S+Y123H+Y147R+Q154R;
E25F+I76Y+V82S+Y123H+Y147R+Q154R;
I76Y+V82T+Y123H+Y147R+Q154R;
N38G+I76Y+V82S+Y123H+Y147R+Q154R;
R23H+I76Y+V82S+Y123H+Y147R+Q154R;
P54C+I76Y+V82S+Y123H+Y147R+Q154R;
R21N+I76Y+V82S+Y123H+Y147R+Q154R;
I76Y+V82S+Y123H+D139M+Y147R+Q154R;
Y73S+I76Y+V82S+Y123H+Y147R+Q154R;
E25F+I76Y+V82S+Y123H+Y147R+Q154R;
I76Y+V82T+Y123H+Y147R+Q154R;
N38G+I76Y+V82S+Y123H+Y147R+Q154R;
R23H+I76Y+V82S+Y123H+Y147R+Q154R;
P54C+I76Y+V82S+Y123H+Y147R+Q154R;
R21N+I76Y+V82S+Y123H+Y147R+Q154R;
I76Y+V82S+Y123H+D139M+Y147R+Q154R;
Y73S+I76Y+V82S+Y123H+Y147R+Q154R;
V82S+Q154R;
N72K+V82S+Y123H+Y147R+Q154R;
Q71M+V82S+Y123H+Y147R+Q154R;
V82S+Y123H+T133K+Y147R+Q154R;
V82S+Y123H+T133K+Y147R+Q154R+A158K;
M70V+Q71M+N72K+V82S+Y123H+Y147R+Q154R;
N72K V82S+Y123H+Y147R+Q154R;
Q71M V82S+Y123H+Y147R+Q154R;
M70V+V82S+M94V+Y123H+Y147R+Q154R;
V82S+Y123H+T133K+Y147R+Q154R;
V82S+Y123H+T133K+Y147R+Q154R+A158K; or
M70V+Q71M+N72K+V82S+Y123H+Y147R+Q154R.

9-11. (canceled)

12. A fusion protein comprising a polynucleotide programmable DNA binding domain and at least one base editor domain that is an adenosine deaminase variant comprising an alteration at an amino acid position selected from the group consisting of 21, 23, 25, 38, 51, 54, 70, 71, 72, 73, 94, 124, 133, 139, 146, and 158 of SEQ ID NO: 1, or a corresponding alteration in another adenosine deaminase:
```
(SEQ ID NO: 1)
                10 20 30 40
MSEVEFSHEY WMRHALTLAK RARDEREVPV GAVLVLNNRV
                50 60 70 80
IGEGWNRAIG LHDPTAHAEI MALRQGGLVM QNYRLIDATL
                90 100 110 120
YVTFEPCVMC AGAMIHSRIG RVVFGVRNAK TGAAGSLMDV
              130 140 150 160
LHYPGMNHRV EITEGILADE GAALLCYFER MPRQVFNAQK
KAQSSTD.
```

13. (canceled)

14. A fusion protein comprising a polynucleotide programmable DNA binding domain and at least one base editor domain that is an adenosine deaminase variant comprising an alteration selected from the group consisting of R21N, R23H, E25F, N38G, L51W, P54C, M70V, Q71M, N72K, Y73S, M94V, P124W, T133K, D139L, D139M, C146R, and A158K of SEQ ID NO: 1, or a corresponding alteration in another adenosine deaminase.

15. (canceled)

16. A fusion protein comprising a polynucleotide programmable DNA binding domain and at least one base editor domain that is an adenosine deaminase variant comprising an alteration V82T and one or more alterations selected from the group consisting of R21N, R23H, E25F, N38G, L51W, P54C, M70V, Q71M, N72K, Y73S, M94V, P124W, T133K, D139L, D139M, C146R, and A158K of SEQ ID NO: 1, or a corresponding alteration in another adenosine deaminase.

17-20. (canceled)

21. The fusion protein of claim 16, wherein the adenosine deaminase variant comprises any one of the following groups of alterations:
E25F+V82S+Y123H;
T133K+Y147R+Q154R;
E25F+V82S+Y123H+Y147R+Q154R;
L51W+V82S+Y123H+C146R+Y147R+Q154R;
Y73S+V82S+Y123H+Y147R+Q154R;
P54C+V82S+Y123H+Y147R+Q154R;
N38G+V82T+Y123H+Y147R+Q154R;
N72K+V82S+Y123H+D139L+Y147R+Q154R;
E25F+V82S+Y123H+D139M+Y147R+Q154R;
Q71M+V82S+Y123H+Y147R+Q154R;
E25F+V82S+Y123H+T133K+Y147R+Q154R;
E25F+V82S+Y123H+Y147R+Q154R;
V82S+Y123H+P124W+Y147R+Q154R;
L51W+V82S+Y123H+C146R+Y147R+Q154R;
P54C+V82S+Y123H+Y147R+Q154R;
Y73S+V82S+Y123H+Y147R+Q154R;
N38G+V82T+Y123H+Y147R+Q154R;
R23H+V82S+Y123H+Y147R+Q154R;
R21N+V82S+Y123H+Y147R+Q154R;
V82S+Y123H+Y147R+Q154R+A158K;
N72K+V82S+Y123H+D139L+Y147R+Q154R;
E25F+V82S+Y123H+D139M+Y147R+Q154R;
M70V+V82S+M94V+Y123H+Y147R+Q154R;
Q71M+V82S+Y123H+Y147R+Q154R;
E25F+I76Y+V82S+Y123H+Y147R+Q154R;
I76Y+V82T+Y123H+Y147R+Q154R;
N38G+I76Y+V82S+Y123H+Y147R+Q154R;
R23H+I76Y+V82S+Y123H+Y147R+Q154R;
P54C+I76Y+V82S+Y123H+Y147R+Q154R;
R21N+I76Y+V82S+Y123H+Y147R+Q154R;
I76Y+V82S+Y123H+D139M+Y147R+Q154R;
Y73S+I76Y+V82S+Y123H+Y147R+Q154R;
E25F+I76Y+V82S+Y123H+Y147R+Q154R;
I76Y+V82T+Y123H+Y147R+Q154R;
N38G+I76Y+V82S+Y123H+Y147R+Q154R;
R23H+I76Y+V82S+Y123H+Y147R+Q154R;
P54C+I76Y+V82S+Y123H+Y147R+Q154R;
R21N+I76Y+V82S+Y123H+Y147R+Q154R;
I76Y+V82S+Y123H+D139M+Y147R+Q154R;
Y73S+I76Y+V82S+Y123H+Y147R+Q154R;
V82S+Q154R;
N72K+V82S+Y123H+Y147R+Q154R;
Q71M+V82S+Y123H+Y147R+Q154R;
V82S+Y123H+T133K+Y147R+Q154R;
V82S+Y123H+T133K+Y147R+Q154R+A158K;
M70V+Q71M+N72K+V82S+Y123H+Y147R+Q154R;
N72K+V82S+Y123H+Y147R+Q154R;
Q71M+V82S+Y123H+Y147R+Q154R;
M70V+V82S+M94V+Y123H+Y147R+Q154R;
V82S+Y123H+T133K+Y147R+Q154R;
V82S+Y123H+T133K+Y147R+Q154R+A158K; or
M70V+Q71M+N72K+V82S+Y123H+Y147R+Q154R.

22-31. (canceled)

32. A fusion protein comprising a polynucleotide programmable DNA binding domain comprising the following sequence:
EIGKATAKYFFYSNIMNFFKTEITLANGEIRKRPLIETNGETGEIVWDKGRDFATVR
KVLSMPQVNIVKKTEVQTGGFSKESILPKRNSDKLIARKKDWDPKKYGGFMQPTV
AYSVLVVAKVEKGKSKKLKSVKELLGITIMERSSFEKNPIDFLEAKGYKEVKKDLII
KLPKYSLFELENGRKRMLASAKFLQKGNELALPSKYVNFLYLASHYEKLKGSPED
NEQKQLFVEQHKHYLDEHIEQISEFSKRVILADANLDKVLSAYNKHRDKPIREQAEN
IIHLFTLTNLGAPRAFKYFDTTIARKEYRSTKEVLDATLIHQSITGLYETRIDLSQLG
GDGGSGGSGGSGGSGGSGGSGGMDKKYSIGLAIGTNSVGWAVITDEYKVPSKKFKVL
GNTDRHSIKKNLIGALLFDSGETAEATRLKRTARRRYTRRKNRICYLQEIFSNEMA
KVDDSFFHRLEESFLVEEDKKHERHPIFGNIVDEVAYHEKYPTIYHLRKKLVDSTD
KADLRLIYLALAHMIKFRGHFLIEGDLNPDNSDVDKLFIQLVQTYNQLFEENPINAS
GVDAKAILSARLSKSRRLENLIAQLPGEKKNGLFGNLIALSLGLTPNFKSNFDLAED
AKLQLSKDTYDDDLDNLLAQIGDQYADLFLAAKNLSDAILLSDILRVNTEITKAPLS
ASMIKRYDEHHQDLTLLKALVRQQLPEKYKEIFFDQSKNGYAGYIDGGASQEEFY
KFIKPILEKMDGTEELLVKLNREDLLRKQRTFDNGSIPHQIHLGELHAILRRQEDFY
PFLKDNREKIEKILTFRIPYYVGPLARGNSRFAWMTRKSEETITPWNFEEVVDKGAS
AQSFIERMTNFDKNLPNEKVLPKHSLLYEYFTVYNELTKVKYVTEGMRKPAFLSGE
QKKAIVDLLFKTNRKVTVKQLKEDYFKKIECFDSVEISGVEDRFNASLGTYHDLLKI
IKDKDFLDNEENEDILEDIVLTLTLFEDREMIEERLKTYAHLFDDKVMKQLKRRRY
TGWGRLSRKLINGIRDKQSGKTILDFLKSDGFANRNFMQLIHDDSLTFKEDIQKAQ
VSGQGDSLHEHIANLAGSPAIKKGILQTVKVVDELVKVMGRHKPENIVIEMARENQ
TTQKGQKNSRERMKRIEEGIKELGSQILKEHPVENTQLQNEKLYLYYLQNGRDMY
VDQELDINRLSDYDVDHIVPQSFLKDDSIDNKVLTRSDKNRGKSDNVPSEEVVKKM
KNYWRQLLNAKLITQRKFDNLTKAERGGLSELDKAGFIKRQLVETRQITKHVAQI
LDSRMNTKYDENDKLIREVKVITLKSKLVSDFRKDFQFYKVREINNYHHAHDAYLN
AVVGTALIKKYPKLESEFVYGDYKVYDVRKMIAKSEQEGADKRTADGSEFESPKKK
RKV*
wherein the bold sequence indicates sequence derived from Cas9, the italics sequence denotes a linker sequence, and the underlined sequence denotes a bipartite nuclear localization sequence, and at least one base editor domain comprising an adenosine deaminase variant comprising an alteration at an amino acid position selected from the group consisting of 21, 23, 25, 38, 51, 54, 70, 71, 72, 73, 94, 124, 133, 138, 139, 146, and 158 of SEQ ID NO: 1.

33-38. (canceled)

39. The fusion protein of claim 32, wherein the adenosine deaminase variant comprises any one of the following groups of alterations:
E25F+V82S+Y123H;
T133K+Y147R+Q154R;
E25F+V82S+Y123H+Y147R+Q154R;
L51W+V82S+Y123H+C146R+Y147R+Q154R;
Y73S+V82S+Y123H+Y147R+Q154R;
P54C+V82S+Y123H+Y147R+Q154R;
N38G+V82T+Y123H+Y147R+Q154R;
N72K+V82S+Y123H+D139L+Y147R+Q154R;
E25F+V82S+Y123H+D139M+Y147R+Q154R;
Q71M+V82S+Y123H+Y147R+Q154R;
E25F+V82S+Y123H+T133K+Y147R+Q154R;
E25F+V82S+Y123H+Y147R+Q154R;
V82S+Y123H+P124W+Y147R+Q154R;
L51W+V82S+Y123H+C146R+Y147R+Q154R;
P54C+V82S+Y123H+Y147R+Q154R;
Y73S+V82S+Y123H+Y147R+Q154R;
N38G+V82T+Y123H+Y147R+Q154R;
R23H+V82S+Y123H+Y147R+Q154R;
R21N+V82S+Y123H+Y147R+Q154R;
V82S+Y123H+Y147R+Q154R+A158K;
N72K+V82S+Y123H+D139L+Y147R+Q154R;
E25F+V82S+Y123H+D139M+Y147R+Q154R;
M70V+V82S+M94V+Y123H+Y147R+Q154R;
Q71M+V82S+Y123H+Y147R+Q154R;
E25F+I76Y+V82S+Y123H+Y147R+Q154R;
I76Y+V82T+Y123H+Y147R+Q154R;
N38G+I76Y+V82S+Y123H+Y147R+Q154R;
R23H+I76Y+V82S+Y123H+Y147R+Q154R;
P54C+I76Y+V82S+Y123H+Y147R+Q154R;
R21N+I76Y+V82S+Y123H+Y147R+Q154R;
I76Y+V82S+Y123H+D139M+Y147R+Q154R;
Y73S+I76Y+V82S+Y123H+Y147R+Q154R;
E25F+I76Y+V82S+Y123H+Y147R+Q154R;
I76Y+V82T+Y123H+Y147R+Q154R;
N38G+I76Y+V82S+Y123H+Y147R+Q154R;
R23H+I76Y+V82S+Y123H+Y147R+Q154R;
P54C+I76Y+V82S+Y123H+Y147R+Q154R;
R21N+I76Y+V82S+Y123H+Y147R+Q154R;
I76Y+V82S+Y123H+D139M+Y147R+Q154R;
Y73S+I76Y+V82S+Y123H+Y147R+Q154R;
V82S+Q154R;
N72K+V82S+Y123H+Y147R+Q154R;
Q71M+V82S+Y123H+Y147R+Q154R;
V82S+Y123H+T133K+Y147R+Q154R;
V82S+Y123H+T133K+Y147R+Q154R+A158K;
M70V+Q71M+N72K+V82S+Y123H+Y147R+Q154R;
N72K+V82S+Y123H+Y147R+Q154R;
Q71M+V82S+Y123H+Y147R+Q154R;
M70V+V82S+M94V+Y123H+Y147R+Q154R;
V82S+Y123H+T133K+Y147R+Q154R;
V82S+Y123H+T133K+Y147R+Q154R+A158K;
M70V+Q71M+N72K+V82S+Y123H+Y147R+Q154R; or
or any other alteration or group thereof of Table 14.

40-60. (canceled)

61. A polynucleotide encoding the fusion protein of claim 32.

62. A cell produced by introducing into the cell, or a progenitor thereof:
a polynucleotide encoding the fusion protein of claim 12, and
one or more guide polynucleotides that target the base editor to effect an A•T to GC alteration of a SNP associated with a genetic disease.

63-66. (canceled)

67. An isolated cell or population of cells propagated or expanded from the cell of claim 62.

68. A method of treating a genetic disease in a subject in need thereof, the method comprising administering to the subject a cell of claim 62.

69. (canceled)

70. A base editor system comprising a polynucleotide programmable DNA binding domain and at least one base editor domain that is an adenosine deaminase variant comprising an alteration at an amino acid position selected from the group consisting of 21, 23, 25, 38, 51, 54, 70, 71, 72, 73, 82, 94, 124, 133, 139, 146, and 158 of SEQ ID NO: 1, or a corresponding alteration in another adenosine deaminase:
```
(SEQ ID NO: 1)
                10 20 30 40
MSEVEFSHEY WMRHALTLAK RARDEREVPV GAVLVLNNRV
                50 60 70 80
IGEGWNRAIG LHDPTAHAEI MALRQGGLVM QNYRLIDATL
                90 100 110 120
YVTFEPCVMC AGAMIHSRIG RVVFGVRNAK TGAAGSLMDV
              130 140 150 160
LHYPGMNHRV EITEGILADE GAALLCYFER MPRQVFNAQK
KAQSSTD.
```

71-86. (canceled)

87. A method for correcting a single nucleotide polymorphism (SNP) in a polynucleotide:
contacting a target nucleotide sequence, at least a portion of which is located in the polynucleotide or its reverse complement, with a fusion protein of claim 12; and editing the SNP by deaminating the SNP or its complement nucleobase upon targeting of the base editor to the target nucleotide sequence, wherein deaminating the SNP or its complement nucleobase corrects the SNP.

88-89. (canceled)

90. A method for editing a polynucleotide, the method comprising contacting a target nucleotide sequence with the fusion protein of claim 12, thereby editing the polynucleotide.

91-92. (canceled)

93. A base editor comprising an ABE9 comprising a TadA*7.10 adenosine deaminase variant domain and a Cas9 endonuclease domain selected from the following:
monoTadA*7.10 having mutations I76Y+V82T+Y147T+Q154S+A109S of SEQ ID NO: 1, and spCas9 having mutations I322V, S409I, E427G, R654L, R753G (MQKFRAER);
monoTadA*7.10 having mutations I76Y+V82T+Y147T+Q154S+T111R of SEQ ID NO: 1, and spCas9 having mutations I322V, S409I, E427G, R654L, R753G (MQKFRAER);
monoTadA*7.10 having mutations I76Y+V82T+Y147T+Q154S+D119N of SEQ ID NO: 1, and spCas9 having mutations I322V, S409I, E427G, R654L, R753G (MQKFRAER);
monoTadA*7.10 having mutations I76Y+V82T+Y147T+Q154S+H122N of SEQ ID NO: 1, and spCas9 having mutations I322V, S409I, E427G, R654L, R753G (MQKFRAER);
monoTadA*7.10 having mutations I76Y+V82T+Y147d+Q154S of SEQ ID NO: 1, and spCas9 having mutations I322V, S409I, E427G, R654L, R753G (MQKFRAER);
monoTadA*7.10 having mutations I76Y+V82T+Y147T+Q154S+F149Y of SEQ ID NO: 1, and spCas9 having mutations I322V, S409I, E427G, R654L, R753G (MQKFRAER);
monoTadA*7.10 having mutations I76Y+V82T+Y147T+Q154S+T166I of SEQ ID NO: 1, and spCas9 having mutations I322V, S409I, E427G, R654L, R753G (MQKFRAER); and
monoTadA*7.10 having mutations I76Y+V82T+Y147T+Q154S+D167N of SEQ ID NO: 1, and spCas9 having mutations I322V, S409I, E427G, R654L, R753G (MQKFRAER).
mono TadA*7.10 having mutations I76Y+V82T+Y147T+Q154S+L36H+N157K of SEQ ID NO: 1, and spCas9 having mutations I322V, S409I, E427G, R654L, R753G, R1114G (MQKFRAER);
mono TadA*7.10 having mutations I76Y+V82T+Y147D+Q154S+F149Y+D167N+L36H+N157K of SEQ ID NO: 1, and SpCas9 having mutations I322V, S409I, E427G, R654L, R753G, R1114G (MQKFRAER);
monoTadA*7.10 having mutations I76Y+V82T+Y147D+Q154S+F149Y+D167N+L36H+N157K+V106W of SEQ ID NO: 1, and SpCas9 having mutations I322V, S409I, E427G, R654L, R753G, R1114G (MQKFRAER);
mono TadA*7.10 having mutations A109S+T111R+D119N+H122N+Y147D+F149Y+T166I+D167N of SEQ ID NO: 1, and SpCas9 having mutations I322V, S409I, E427G, R654L, R753G, R1114G, MQKFRAER; and
mono TadA*7.10 having mutations A109S+T111R+D119N+H122N+Y147D+F149Y+T166I+D167N+V106W of SEQ ID NO: 1, and SpCas9 having mutations I322V, S409I, E427G, R654L, R753G, R1114G (MQKFRAER); and one or more guide polynucleotides that target the adenosine deaminase variant domain to effect an A•T to G•C alteration of a SNP associated with a genetic disease.

94. (canceled)

95. A vector comprising one or more polynucleotides encoding an ABE9 base editor comprising a TadA adenosine deaminase domain and an SpCas9 endonuclease domain selected from monoTadA*7.10 having mutations I76Y+V82T+Y147T+Q154S+A109S and spCas9 having mutations I322V, S409I, E427G, R654L, R753G (MQKFRAER);
monoTadA*7.10 having mutations I76Y+V82T+Y147T+Q154S+T111R and spCas9 having mutations I322V, S409I, E427G, R654L, R753G (MQKFRAER);
monoTadA*7.10 having mutations I76Y+V82T+Y147T+Q154S+D119N and spCas9 having mutations I322V, S409I, E427G, R654L, R753G (MQKFRAER);
monoTadA*7.10 having mutations I76Y+V82T+Y147T+Q154S+H122N and spCas9 having mutations I322V, S409I, E427G, R654L, R753G (MQKFRAER);
monoTadA*7.10 having mutations I76Y+V82T+Y147d+Q154S and spCas9 having mutations I322V, S409I, E427G, R654L, R753G (MQKFRAER);
monoTadA*7.10 having mutations I76Y+V82T+Y147T+Q154S+F149Y and spCas9 having mutations I322V, S409I, E427G, R654L, R753G (MQKFRAER);
monoTadA*7.10 having mutations I76Y+V82T+Y147T+Q154S+T166I and spCas9 having mutations I322V, S409I, E427G, R654L, R753G (MQKFRAER); and
monoTadA*7.10 having mutations I76Y+V82T+Y147T+Q154S+D167N and spCas9 having mutations I322V, S409I, E427G, R654L, R753G (MQKFRAER).
mono TadA*7.10 having mutations I76Y+V82T+Y147T+Q154S+L36H+N157K and spCas9 having mutations I322V, S409I, E427G, R654L, R753G, R1114G (MQKFRAER);
mono TadA*7.10 having mutations I76Y+V82T+Y147D+Q154S+F149Y+D167N+L36H+N157K and SpCas9 having mutations I322V, S409I, E427G, R654L, R753G, R1114G (MQKFRAER);
monoTadA*7.10 having mutations I76Y+V82T+Y147D+Q154S+F149Y+D167N+L36H+N157K+V106W and SpCas9 having mutations I322V, S409I, E427G, R654L, R753G, R1114G, (MQKFRAER)
mono TadA*7.10 having mutations A109S+T111R+D119N+H122N+Y147D+F149Y+T166I+D167N and SpCas9 having mutations I322V, S409I, E427G, R654L, R753G, R1114G (MQKFRAER); and
mono TadA*7.10 having mutations A109S+T111R+D119N+H122N+Y147D+F149Y+T166I+D167N+V106W and SpCas9 having mutations I322V, S409I, E427G, R654L, R753G, R1114G (MQKFRAER).

96. (canceled)

97. A composition comprising the fusion protein of claim 12.

98. (canceled)

99. A composition comprising the fusion protein of claim 12.

100. A composition comprising the base editor system of claim 70, wherein the guide RNA comprises a nucleic acid sequence that is complementary to an SERPINA1 gene associated with alpha-1 antitrypsin deficiency (A1AD).

101-103. (canceled)

104. A pharmaceutical composition for the treatment of a disease or disorder comprising the fusion protein of claim 1.

105-114. (canceled)

115. A method of treating alpha-1 antitrypsin deficiency (A1AD), the method comprising administering to a subject in need thereof the pharmaceutical composition of claim 104.

116-119. (canceled)

120. An adenosine deaminase variant which is a TadA*7.10 variant comprising any one of the following amino acid alterations or groups of alterations:
V82T;
I76Y+V82T; or
I76Y+V82T+Y147T+Q154S.

121. A fusion protein comprising a polynucleotide programmable DNA binding domain and at least one base editor domain that is an TadA*7.10 adenosine deaminase variant comprising any one of the following amino acid alterations or groups of alterations:
V82T;
I76Y+V82T; or
I76Y+V82T+Y147T+Q154S.

122-124. (canceled)

125. A nucleobase editor comprising a TadA*7.10 adenosine deaminase variant domain and a Cas9 endonuclease domain selected from the following:
monoTadA*7.10 having mutation V82T and spCas9 having mutations I322V, S409I, E427G, R654L, R753G (MQKFRAER);
monoTadA*7.10 having mutations I76Y+V82T and spCas9 having mutations I322V, S409I, E427G, R654L, R753G (MQKFRAER); or
monoTadA*7.10 having mutations I76Y+V82T+Y147T+Q154S and spCas9 having mutations I322V, S409I, E427G, R654L, R753G (MQKFRAER).

The application's sequence listing, which the Patent Office published only in electronic form, follows.

SEQUENCE LISTING (187 sequences)

SEQ ID NO: 1 - protein, 167 aa, Artificial Sequence
  Description of Artificial Sequence: Synthetic polypeptide
MSEVEFSHEYWMRHALTLAKRARDEREVPVGAVLVLNNRVIGEGWNRAIGLHDPTAHAEIMALRQGGLVMQNYRLIDATLYVTFEPCVMCAGAMIHSRIGRVVFGVRNAKTGAAGSLMDVLHYPGMNHRVEITEGILADECAALLCYFFRMPRQVFNAQKKAQSSTD

SEQ ID NO: 2 - protein, 1410 aa, Artificial Sequence
  Description of Artificial Sequence: Synthetic polypeptide
EIGKATAKYFFYSNIMNFFKTEITLANGEIRKRPLIETNGETGEIVWDKGRDFATVRKVLSMPQVNIVKKTEVQTGGFSKESILPKRNSDKLIARKKDWDPKKYGGFMQPTVAYSVLVVAKVEKGKSKKLKSVKELLGITIMERSSFEKNPIDFLEAKGYKEVKKDLIIKLPKYSLFELENGRKRMLASAKFLQKGNELALPSKYVNFLYLASHYEKLKGSPEDNEQKQLFVEQHKHYLDEIIEQISEFSKRVILADANLDKVLSAYNKHRDKPIREQAENIIHLFTLTNLGAPRAFKYFDTTIARKEYRSTKEVLDATLIHQSITGLYETRIDLSQLGGDGGSGGSGGSGGSGGSGGSGGMDKKYSIGLAIGTNSVGWAVITDEYKVPSKKFKVLGNTDRHSIKKNLIGALLFDSGETAEATRLKRTARRRYTRRKNRICYLQEIFSNEMAKVDDSFFHRLEESFLVEEDKKHERHPIFGNIVDEVAYHEKYPTIYHLRKKLVDSTDKADLRLIYLALAHMIKFRGHFLIEGDLNPDNSDVDKLFIQLVQTYNQLFEENPINASGVDAKAILSARLSKSRRLENLIAQLPGEKKNGLFGNLIALSLGLTPNFKSNFDLAEDAKLQLSKDTYDDDLDNLLAQIGDQYADLFLAAKNLSDAILLSDILRVNTEITKAPLSASMIKRYDEHHQDLTLLKALVRQQLPEKYKEIFFDQSKNGYAGYIDGGASQEEFYKFIKPILEKMDGTEELLVKLNREDLLRKQRTFDNGSIPHQIHLGELHAILRRQEDFYPFLKDNREKIEKILTFRIPYYVGPLARGNSRFAWMTRKSEETITPWNFEEVVDKGASAQSFIERMTNFDKNLPNEKVLPKHSLLYEYFTVYNELTKVKYVTEGMRKPAFLSGEQKKAIVDLLFKTNRKVTVKQLKEDYFKKIECFDSVEISGVEDRFNASLGTYHDLLKIIKDKDFLDNEENEDILEDIVLTLTLFEDREMIEERLKTYAHLFDDKVMKQLKRRRYTGWGRLSRKLINGIRDKQSGKTILDFLKSDGFANRNFMQLIHDDSLTFKEDIQKAQVSGQGDSLHEHIANLAGSPAIKKGILQTVKVVDELVKVMGRHKPENIVIEMARENQTTQKGQKNSRERMKRIEEGIKELGSQILKEHPVENTQLQNEKLYLYYLQNGRDMYVDQELDINRLSDYDVDHIVPQSFLKDDSIDNKVLTRSDKNRGKSDNVPSEEVVKKMKNYWRQLLNAKLITQRKFDNLTKAERGGLSELDKAGFIKRQLVETRQITKHVAQILDSRMNTKYDENDKLIREVKVITLKSKLVSDFRKDFQFYKVREINNYHHAHDAYLNAVVGTALIKKYPKLESEFVYGDYKVYDVRKMIAKSEQEGADKRTADGSEFESPKKKRKV

SEQ ID NO: 3 - protein, 24 aa, Artificial Sequence
  Description of Artificial Sequence: Synthetic peptide
SGGSSGGSSGSETPGTSESATPES

SEQ ID NO: 4 - protein, 1052 aa, Artificial Sequence
  Description of Artificial Sequence: Synthetic polypeptide
KRNYILGLAIGITSVGYGIIDYETRDVIDAGVRLFKEANVENNEGRRSKRGARRLKRRRRHRIQRVKKLLFDYNLLTDHSELSGINPYEARVKGLSQKLSEEEFSAALLHLAKRRGVHNVNEVEEDTGNELSTKEQISRNSKALEEKYVAELQLERLKKDGEVRGSINRFKTSDYVKEAKQLLKVQKAYHQLDQSFIDTYIDLLETRRTYYEGPGEGSPFGWKDIKEWYEMLMGHCTYFPEELRSVKYAYNADLYNALNDLNNLVITRDENEKLEYYEKFQIIENVFKQKKKPTLKQIAKEILVNEEDIKGYRVTSTGKPEFTNLKVYHDIKDITARKEIIENAELLDQIAKILTIYQSSEDIQEELTNLNSELTQEEIEQISNLKGYTGTHNLSLKAINLILDELWHTNDNQIAIFNRLKLVPKKVDLSQQKEIPTTLVDDFILSPVVKRSFIQSIKVINAIIKKYGLPNDIIIELAREKNSKDAQKMINEMQKRNRQTNERIEEIIRTTGKENAKYLIEKIKLHDMQEGKCLYSLEAIPLEDLLNNPFNYEVDHIIPRSVSFDNSFNNKVLVKQEENSKKGNRTPFQYLSSSDSKISYETFKKHILNLAKGKGRISKTKKEYLLEERDINRFSVQKDFINRNLVDTRYATRGLMNLLRSYFRVNNLDVKVKSINGGFTSFLRRKWKFKKERNKGYKHHAEDALIIANADFIFKEWKKLDKAKKVMENQMFEEKQAESMPEIETEQEYKEIFITPHQIKHIKDFKDYKYSHRVDKKPNRKLINDTLYSTRKDDKGNTLIVNNLNGLYDKDNDKLKKLINKSPEKLLMYHHDPQTYQKLKLIMEQYGDEKNPLYKYYEETGNYLTKYSKKDNGPVIKKIKYYGNKLNAHLDITDDYPNSRNKVVKLSLKPYRFDVYLDNGVYKFVTVKNLDVIKKENYYEVNSKCYEEAKKLKKISNQAEFIASFYKNDLIKINGELYRVIGVNNDLLNRIEVNMIDITYREYLENMNDKRPPHIIKTIASKTQSIKKYSTDILGNLYEVKSKKHPQIIKKG

SEQ ID NO: 5 - RNA, 103 nt, Artificial Sequence
  Description of Artificial Sequence: Synthetic polynucleotide
accaucgacaagaaagggacugaguuuuagagcuagaaauagcaaguuaaaauaaggcuaguccguuaucaacuugaaaaaguggcaccgagucggugcuuuu

SEQ ID NO: 6 - RNA, 102 nt, Artificial Sequence
  Description of Artificial Sequence: Synthetic polynucleotide
ccaucgacaagaaagggacugaguuuuagagcuagaaauagcaaguuaaaauaaggcuaguccguuaucaacuugaaaaaguggcaccgagucggugcuuuu

SEQ ID NO: 7 - RNA, 101 nt, Artificial Sequence
  Description of Artificial Sequence: Synthetic polynucleotide
caucgacaagaaagggacugaguuuuagagcuagaaauagcaaguuaaaauaaggcuaguccguuaucaacuugaaaaaguggcaccgagucggugcuuuu

SEQ ID NO: 8 - RNA, 100 nt, Artificial Sequence
  Description of Artificial Sequence: Synthetic polynucleotide
aucgacaagaaagggacugaguuuuagagcuagaaauagcaaguuaaaauaaggcuaguccguuaucaacuugaaaaaguggcaccgagucggugcuuuu

SEQ ID NO: 9 - RNA, 99 nt, Artificial Sequence
  Description of Artificial Sequence: Synthetic oligonucleotide
ucgacaagaaagggacugaguuuuagagcuagaaauagcaaguuaaaauaaggcuaguccguuaucaacuugaaaaaguggcaccgagucggugcuuuu

SEQ ID NO: 10 - RNA, 98 nt, Artificial Sequence
  Description of Artificial Sequence: Synthetic oligonucleotide
cgacaagaaagggacugaguuuuagagcuagaaauagcaaguuaaaauaaggcuaguccguuaucaacuugaaaaaguggcaccgagucggugcuuuu

SEQ ID NO: 11 - protein, 167 aa, Unknown
  Description of Unknown: TadA sequence
MSEVEFSHEYWMRHALTLAKRAWDEREVPVGAVLVHNNRVIGEGWNRPIGRHDPTAHAEIMALRQGGLVMQNYRLIDATLYVTLEPCVMCAGAMIHSRIGRVVFGARDAKTGAAGSLMDVLHHPGMNHRVEITEGILADECAALLSDFFRMRRQEIKAQKKAQSSTD

SEQ ID NO: 12 - protein, 167 aa, Artificial Sequence
  Description of Artificial Sequence: Synthetic polypeptide
MSEVEFSHEYWMRHALTLAKRARDEREVPVGAVLVLNNRVIGEGWNRAIGLHDPTAHAEIMALRQGGLVMQNYRLIDATLYVTFEPCVMCAGAMIHSRIGRVVFGVRNAKTGAAGSLMDVLHYPGMNHRVEITEGILADECAALLCTFFRMPRQVFNAQKKAQSSTD

SEQ ID NO: 13 - protein, 160 aa, Staphylococcus aureus
MGSHMTNDIYFMTLAIEEAKKAAQLGEVPIGAIITKDDEVIARAHNLRETLQQPTAHAEHIAIERAAKVLGSWRLEGCTLYVTLEPCVMCAGTIVMSRIPRVVYGADDPKGGCSGSLMNLLQQSNFNHRAIVDKGVLKEACSTLLTTFFKNLRANKKSTN

SEQ ID NO: 14 - protein, 161 aa, Bacillus subtilis
MTQDELYMKEAIKEAKKAEEKGEVPIGAVLVINGEIIARAHNLRETEQRSIAHAEMLVIDEACKALGTWRLEGATLYVTLEPCPMCAGAVVLSRVEKVVFGAFDPKGGCSGTLMNLLQEERFNHQAEVVSGVLEEECGGMLSAFFRELRKKKKAARKNLSE

SEQ ID NO: 15 - protein, 183 aa, Salmonella typhimurium
MPPAFITGVTSLSDVELDHEYWMRHALTLAKRAWDEREVPVGAVLVHNHRVIGEGWNRPIGRHDPTAHAEIMALRQGGLVLQNYRLLDTTLYVTLEPCVMCAGAMVHSRIGRVVFGARDAKTGAAGSLIDVLHHPGMNHRVEIIEGVLRDECATLLSDFFRMRRQEIKALKKADRAEGAGPAV

SEQ ID NO: 16 - protein, 164 aa, Shewanella putrefaciens
MDEYWMQVAMQMAEKAEAAGEVPVGAVLVKDGQQIATGYNLSISQHDPTAHAEILCLRSAGKKLENYRLLDATLYITLEPCAMCAGAMVHSRIARVVYGARDEKTGAAGTVVNLLQHPAFNHQVEVTSGVLAEACSAQLSRFFKRRRDEKKALKLAQRAQQGIE

SEQ ID NO: 17 - protein, 173 aa, Haemophilus influenzae
MDAAKVRSEFDEKMMRYALELADKAEALGEIPVGAVLVDDARNIIGEGWNLSIVQSDPTAHAEIIALRNGAKNIQNYRLLNSTLYVTLEPCTMCAGAILHSRIKRLVFGASDYKTGAIGSRFHFFDDYKMNHTLEITSGVLAEECSQKLSTFFQKRREEKKIEKALLKSLSDK

SEQ ID NO: 18 - protein, 161 aa, Caulobacter crescentus
MRTDESEDQDHRMMRLALDAARAAAEAGETPVGAVILDPSTGEVIATAGNGPIAAHDPTAHAEIAAMRAAAAKLGNYRLTDLTLVVTLEPCAMCAGAISHARIGRVVFGADDPKGGAVVHGPKFFAQPTCHWRPEVTGGVLADESADLLRGFFRARRKAKI

SEQ ID NO: 19 - protein, 179 aa, Geobacter sulfurreducens
MSSLKKTPIRDDAYWMGKAIREAAKAAARDEVPIGAVIVRDGAVIGRGHNLREGSNDPSAHAEMIAIRQAARRSANWRLTGATLYVTLEPCLMCMGAIILARLERVVFGCYDPKGGAAGSLYDLSADPRLNHQVRLSPGVCQEECGTMLSDFFRDLRRRKKAKATPALFIDERKVPPEP

SEQ ID NO: 20 - protein, 418 aa, Homo sapiens
MPSSVSWGILLLAGLCCLVPVSLAEDPQGDAAQKTDTSHHDQDHPTFNKITPNLAEFAFSLYRQLAHQSNSTNIFFSPVSIATAFAMLSLGTKADTHDEILEGLNFNLTEIPEAQIHEGFQELLRTLNQPDSQLQLTTGNGLFLSEGLKLVDKFLEDVKKLYHSEAFTVNFGDTEEAKKQINDYVEKGTQGKIVDLVKELDRDTVFALVNYIFFKGKWERPFEVKDTEEEDFHVDQVTTVKVPMMKRLGMFNIQHCKKLSSWVLLMKYLGNATAIFFLPDEGKLQHLENELTHDIITKFLENEDRRSASLHLPKLSITGTYDLKSVLGQLGITKVFSNGADLSGVTEEAPLKLSKAVHKAVLTIDEKGTEAAGAMFLEAIPMSIPPEVKFNKPFVFLMIEQNTKSPLFMGKVVNPTQK

SEQ ID NO: 21 - DNA, 8811 bp, Artificial Sequence
  Description of Artificial Sequence: Synthetic polynucleotide
atatgccaagtacgccccctattgacgtcaatgacggtaaatggcccgcctggcattatgcccagtacatgaccttatgggactttcctacttggcagtacatctacgtattagtcatcgctattaccatggtgatgcggttttggcagtacatcaatgggcgtggatagcggtttgactcacggggatttccaagtctccaccccattgacgtcaatgggagtttgttttggcaccaaaatcaacgggactttccaaaatgtcgtaacaactccgccccattgacgcaaatgggcggtaggcgtgtacggtgggaggtctatataagcagagctggtttagtgaaccgtcagatccgctagagatccgcggccgctaatacgactcactatagggagagccgccaccatgaaacggacagccgacggaagcgagttcgagtcaccaaagaagaagcggaaagtctctgaagtcgagtttagccacgagtattggatgaggcacgcactgaccctggcaaagcgagcatgggatgaaagagaagtccccgtgggcgccgtgctggtgcacaacaatagagtgatcggagagggatggaacaggccaatcggccgccacgaccctaccgcacacgcagagatcatggcactgaggcagggaggcctggtcatgcagaattaccgcctgatcgatgccaccctgtatgtgacactggagccatgcgtgatgtgcgcaggagcaatgatccacagcaggatcggaagagtggtgttcggagcacgggacgccaagaccggcgcagcaggctccctgatggatgtgctgcaccaccccggcatgaaccaccgggtggagatcacagagggaatcctggcagacgagtgcgccgccctgctgagcgatttctttagaatgcggagacaggagatcaaggcccagaagaaggcacagagctccaccgactctggaggatctagcggaggatcctctggaagcgagacaccaggcacaagcgagtccgccacaccagagagctccggcggctcctccggaggatcctctgaggtggagttttcccacgagtactggatgagacatgccctgaccctggccaagagggcacgcgatgagagggaggtgcctgtgggagccgtgctggtgctgaacaatagagtgatcggcgagggctggaacagagccatcggcctgcacgacccaacagcccatgccgaaattatggccctgagacagggcggcctggtcatgcagaactacagactgattgacgccaccctgtacgtgacattcgagccttgcgtgatgtgcgccggcgccatgatccactctaggatcggccgcgtggtgtttggcgtgaggaacgcaaaaaccggcgccgcaggctccctgatggacgtgctgcactaccccggcatgaatcaccgcgtcgaaattaccgagggaatcctggcagatgaatgtgccgccctgctgtgctatttctttcggatgcctagacaggtgttcaatgctcagaagaaggcccagagctccaccgactccggaggatctagcggaggctcctctggctctgagacacctggcacaagcgagagcgcaacacctgaaagcagcgggggcagcagcggggggtcagacaagaagtacagcatcggcctggccatcggcaccaactctgtgggctgggccgtgatcaccgacgagtacaaggtgcccagcaagaaattcaaggtgctgggcaacaccgaccggcacagcatcaagaagaacctgatcggagccctgctgttcgacagcggcgaaacagccgaggccacccggctgaagagaaccgccagaagaagatacaccagacggaagaaccggatctgctatctgcaagagatcttcagcaacgagatggccaaggtggacgacagcttcttccacagactggaagagtccttcctggtggaagaggataagaagcacgagcggcaccccatcttcggcaacatcgtggacgaggtggcctaccacgagaagtaccccaccatctaccacctgagaaagaaactggtggacagcaccgacaaggccgacctgcggctgatctatctggccctggcccacatgatcaagttccggggccacttcctgatcgagggcgacctgaaccccgacaacagcgacgtggacaagctgttcatccagctggtgcagacctacaaccagctgttcgaggaaaaccccatcaacgccagcggcgtggacgccaaggccatcctgtctgccagactgagcaagagcagacggctggaaaatctgatcgcccagctgcccggcgagaagaagaatggcctgttcggaaacctgattgccctgagcctgggcctgacccccaacttcaagagcaacttcgacctggccgaggatgccaaactgcagctgagcaaggacacctacgacgacgacctggacaacctgctggcccagatcggcgaccagtacgccgacctgtttctggccgccaagaacctgtccgacgccatcctgctgagcgacatcctgagagtgaacaccgagatcaccaaggcccccctgagcgcctctatgatcaagagatacgacgagcaccaccaggacctgaccctgctgaaagctctcgtgcggcagcagctgcctgagaagtacaaagagattttcttcgaccagagcaagaacggctacgccggctacattgacggcggagccagccaggaagagttctacaagttcatcaagcccatcctggaaaagatggacggcaccgaggaactgctcgtgaagctgaacagagaggacctgctgcggaagcagcggaccttcgacaacggcagcatcccccaccagatccacctgggagagctgcacgccattctgcggcggcaggaagatttttacccattcctgaaggacaaccgggaaaagatcgagaagatcctgaccttccgcatcccctactacgtgggccctctggccaggggaaacagcagattcgcctggatgaccagaaagagcgaggaaaccatcaccccctggaacttcgaggaagtggtggacaagggcgcttccgcccagagcttcatcgagcggatgaccaacttcgataagaacctgcccaacgagaaggtgctgcccaagcacagcctgctgtacgagtacttcaccgtgtataacgagctgaccaaagtgaaatacgtgaccgagggaatgagaaagcccgccttcctgagcggcgagcagaaaaaggccatcgtggacctgctgttcaagaccaaccggaaagtgaccgtgaagcagctgaaagaggactacttcaagaaaatcgagtgcttcgactccgtggaaatctccggcgtggaagatcggttcaacgcctccctgggcacataccacgatctgctgaaaattatcaaggacaaggacttcctggacaatgaggaaaacgaggacattctggaagatatcgtgctgaccctgacactgtttgaggacagagagatgatcgaggaacggctgaaaacctatgcccacctgttcgacgacaaagtgatgaagcagctgaagcggcggagatacaccggctggggcaggctgagccggaagctgatcaacggcatccgggacaagcagtccggcaagacaatcctggatttcctgaagtccgacggcttcgccaacagaaacttcatgcagctgatccacgacgacagcctgacctttaaagaggacatccagaaagcccaggtgtccggccagggcgatagcctgcacgagcacattgccaatctggccggcagccccgccattaagaagggcatcctgcagacagtgaaggtggtggacgagctcgtgaaagtgatgggccggcacaagcccgagaacatcgtgatcgaaatggccagagagaaccagaccacccagaagggacagaagaacagccgcgagagaatgaagcggatcgaagagggcatcaaagagctgggcagccagatcctgaaagaacaccccgtggaaaacacccagctgcagaacgagaagctgtacctgtactacctgcagaatgggcgggatatgtacgtggaccaggaactggacatcaaccggctgtccgactacgatgtggaccatatcgtgcctcagagctttctgaaggacgactccatcgacaacaaggtgctgaccagaagcgacaagaaccggggcaagagcgacaacgtgccctccgaagaggtcgtgaagaagatgaagaactactggcggcagctgctgaacgccaagctgattacccagagaaagttcgacaatctgaccaaggccgagagaggcggcctgagcgaactggataaggccggcttcatcaagagacagctggtggaaacccggcagatcacaaagcacgtggcacagatcctggactcccggatgaacactaagtacgacgagaatgacaagctgatccgggaagtgaaagtgatcaccctgaagtccaagctggtgtccgatttccggaaggatttccagttttacaaagtgcgcgagatcaacaactaccaccacgcccacgacgcctacctgaacgccgtcgtgggaaccgccctgatcaaaaagtaccctaagctggaaagcgagttcgtgtacggcgactacaaggtgtacgacgtgcggaagatgatcgccaagagcgagcaggaaatcggcaaggctaccgccaagtacttcttctacagcaacatcatgaactttttcaagaccgagattaccctggccaacggcgagatccggaagcggcctctgatcgagacaaacggcgaaaccggggagatcgtgtgggataagggccgggattttgccaccgtgcggaaagtgctgagcatgccccaagtgaatatcgtgaaaaagaccgaggtgcagacaggcggcttcagcaaagagtctatcctgcccaagaggaacagcgataagctgatcgccagaaagaaggactgggaccctaagaagtacggcggcttcgacagccccaccgtggcctattctgtgctggtggtggccaaagtggaaaagggcaagtccaagaaactgaagagtgtgaaagagctgctggggatcaccatcatggaaagaagcagcttcgagaagaatcccatcgactttctggaagccaagggctacaaagaagtgaaaaaggacctgatcatcaagctgcctaagtactccctgttcgagctggaaaacggccggaagagaatgctggcctctgccggcgaactgcagaagggaaacgaactggccctgccctccaaatatgtgaacttcctgtacctggccagccactatgagaagctgaagggctcccccgaggataatgagcagaaacagctgtttgtggaacagcacaagcactacctggacgagatcatcgagcagatcagcgagttctccaagagagtgatcctggccgacgctaatctggacaaagtgctgtccgcctacaacaagcaccgggataagcccatcagagagcaggccgagaatatcatccacctgtttaccctgaccaatctgggagcccctgccgccttcaagtactttgacaccaccatcgaccggaagaggtacaccagcaccaaagaggtgctggacgccaccctgatccaccagagcatcaccggcctgtacgagacacggatcgacctgtctcagctgggaggtgactctggcggctcaaaaagaaccgccgacggcagcgaattcgagcccaagaagaagaggaaagtctaaccggtcatcatcaccatcaccattgagtttaaacccgctgatcagcctcgactgtgccttctagttgccagccatctgttgtttgcccctcccccgtgccttccttgaccctggaaggtgccactcccactgtcctttcctaataaaatgaggaaattgcatcgcattgtctgagtaggtgtcattctattctggggggtggggtggggcaggacagcaagggggaggattgggaagacaatagcaggcatgctggggatgcggtgggctctatggcttctgaggcggaaagaaccagctggggctcgataccgtcgacctctagctagagcttggcgtaatcatggtcatagctgtttcctgtgtgaaattgttatccgctcacaattccacacaacatacgagccggaagcataaagtgtaaagcctagggtgcctaatgagtgagctaactcacattaattgcgttgcgctcactgcccgctttccagtcgggaaacctgtcgtgccagctgcattaatgaatcggccaacgcgcggggagaggcggtttgcgtattgggcgctcttccgcttcctcgctcactgactcgctgcgctcggtcgttcggctgcggcgagcggtatcagctcactcaaaggcggtaatacggttatccacagaatcaggggataacgcaggaaagaacatgtgagcaaaaggccagcaaaaggccaggaaccgtaaaaaggccgcgttgctggcgtttttccataggctccgcccccctgacgagcatcacaaaaatcgacgctcaagtcagaggtggcgaaacccgacaggactataaagataccaggcgtttccccctggaagctccctcgtgcgctctcctgttccgaccctgccgcttaccggatacctgtccgcctttctcccttcgggaagcgtggcgctttctcatagctcacgctgtaggtatctcagttcggtgtaggtcgttcgctccaagctgggctgtgtgcacgaaccccccgttcagcccgaccgctgcgccttatccggtaactatcgtcttgagtccaacccggtaagacacgacttatcgccactggcagcagccactggtaacaggattagcagagcgaggtatgtaggcggtgctacagagttcttgaagtggtggcctaactacggctacactagaagaacagtatttggtatctgcgctctgctgaagccagttaccttcggaaaaagagttggtagctcttgatccggcaaacaaaccaccgctggtagcggtggtttttttgtttgcaagcagcagattacgcgcagaaaaaaaggatctcaagaagatcctttgatcttttctacggggtctgacactcagtggaacgaaaactcacgttaagggattttggtcatgagattatcaaaaaggatcttcacctagatccttttaaattaaaaatgaagttttaaatcaatctaaagtatatatgagtaaacttggtctgacagttaccaatgcttaatcagtgaggcacctatctcagcgatctgtctatttcgttcatccatagttgcctgactccccgtcgtgtagataactacgatacgggagggcttaccatctggccccagtgctgcaatgataccgcgagacccacgctcaccggctccagatttatcagcaataaaccagccagccggaagggccgagcgcagaagtggtcctgcaactttatccgcctccatccagtctattaattgttgccgggaagctagagtaagtagttcgccagttaatagtttgcgcaacgttgttgccattgctacaggcatcgtggtgtcacgctcgtcgtttggtatggcttcattcagctccggttcccaacgatcaaggcgagttacatgatcccccatgttgtgcaaaaaagcggttagctccttcggtcctccgatcgttgtcagaagtaagttggccgcagtgttatcactcatggttatggcagcactgcataattctcttactgtcatgccatccgtaagatgcttttctgtgactggtgagtactcaaccaagtcattctgagaatagtgtatgcggcgaccgagttgctcttgcccggcgtcaatacgggataataccgcgccacatagcagaactttaaaagtgctcatcattggaaaacgttcttcggggcgaaaactctcaaggatcttaccgctgttgagatccagttcgatgtaacccactcgtgcacccaactgatcttcagcatcttttactttcaccagcgtttctgggtgagcaaaaacaggaaggcaaaatgccgcaaaaaagggaataagggcgacacggaaatgttgaatactcatactcttcctttttcaatattattgaagcatttatcagggttattgtctcatgagcggatacatatttgaatgtatttagaaaaataaacaaataggggttccgcgcacatttccccgaaaagtgccacctgacgtcgacggatcgggagatcgatctcccgatcccctagggtcgactctcagtacaatctgctctgatgccgcatagttaagccagtatctgctccctgcttgtgtgttggaggtcgctgagtagtgcgcgagcaaaatttaagctacaacaaggcaaggcttgaccgacaattgcatgaagaatctgcttagggttaggcgttttgcgctgcttcgcgatgtacgggccagatatacgcgttgacattgattattgactagttattaatagtaatcaattacggggtcattagttcatagcccatatatggagttccgcgttacataacttacggtaaatggcccgcctggctgaccgcccaacgacccccgcccattgacgtcaataatgacgtatgttcccatagtaacgccaatagggactttccattgacgtcaatgggtggagtatttacggtaaactgcccacttggcagtacatcaagtgtatc

SEQ ID NO: 22 - protein, 1367 aa, Streptococcus pyogenes
MDKKYSIGLDIGTNSVGWAVITDDYKVPSKKFKVLGNTDRHSIKKNLIGALLFGSGETAEATRLKRTARRRYTRRKNRICYLQEIFSNEMAKVDDSFFHRLEESFLVEEDKKHERHPIFGNIVDEVAYHEKYPTIYHLRKKLADSTDKADLRLIYLALAHMIKFRGHFLIEGDLNPDNSDVDKLFIQLVQIYNQLFEENPINASRVDAKAILSARLSKSRRLENLIAQLPGEKRNGLFGNLIALSLGLTPNFKSNFDLAEDAKLQLSKDTYDDDLDNLLAQIGDQYADLFLAAKNLSDAILLSDILRVNSEITKAPLSASMIKRYDEHHQDLTLLKALVRQQLPEKYKEIFFDQSKNGYAGYIDGGASQEEFYKFIKPILEKMDGTEELLVKLNREDLLRKQRTFDNGSIPHQIHLGELHAILRRQEDFYPFLKDNREKIEKILTFRIPYYVGPLARGNSRFAWMTRKSEETITPWNFEEVVDKGASAQSFIERMTNFDKNLPNEKVLPKHSLLYEYFTVYNELTKVKYVTEGMRKPAFLSGEQKKAIVDLLFKTNRKVTVKQLKEDYFKKIECFDSVEISGVEDRFNASLGAYHDLLKIIKDKDFLDNEENEDILEDIVLTLTLFEDRGMIEERLKTYAHLFDDKVMKQLKRRRYTGWGRLSRKLINGIRDKQSGKTILDFLKSDGFANRNFMQLIHDDSLTFKEDIQKAQVSGQGHSLHEQIANLAGSPAIKKGILQTVKIVDELVKVMGHKPENIVIEMARENQTTQKGQKNSRERMKRIEEGIKELGSQILKEHPVENTQLQNEKLYLYYLQNGRDMYVDQELDINRLSDYDVDHIVPQSFIKDDSIDNKVLTRSDKNRGKSDNVPSEEVVKKMKNYWRQLLNAKLITQRKFDNLTKAERGGLSELDKAGFIKRQLVETRQITKHVAQILDSRMNTKYDENDKLIREVKVITLKSKLVSDFRKDFQFYKVREINNYHHAHDAYLNAVVGTALIKKYPKLESEFVYGDYKVYDVRKMIAKSEQEIGKATAKYFFYSNIMNFFKTEITLANGEIRKRPLIETNGETGEIVWDKGRDFATVRKVLSMPQVNIVKKTEVQTGGFSKESILPKRNSDKLIARKKDWDPKKYGGFDSPTVAYSVLVVAKVEKGKSKKLKSVKELLGITIMERSSFEKNPIDFLEAKGYKEVKKDLIIKLPKYSLFELENGRKRMLASAGELQKGNELALPSKYVNFLYLASHYEKLKGSPEDNEQKQLFVEQHKHYLDEIIEQISEFSKRVILADANLDKVLSAYNKHRDKPIREQAENIIHLFTLTNLGAPAAFKYFDTTIDRKRYTSTKEVLDATLIHQSITGLYETRIDLSQLGGD

SEQ ID NO: 23 - protein, 1129 aa, Alicyclobacillus acidoterrestris
MAVKSIKVKLRLDDMPEIRAGLWKLHKEVNAGVRYYTEWLSLLRQENLYRRSPNGDGEQECDKTAEECKAELLERLRARQVENGHRGPAGSDDELLQLARQLYELLVPQAIGAKGDAQQIARKFLSPLADKDAVGGLGIAKAGNKPRWVRMREAGEPGWEEEKEKAETRKSADRTADVLRALADFGLKPLMRVYTDSEMSSVEWKPLRKGQAVRTWDRDMFQQAIERMMSWESWNQRVGQEYAKLVEQKNRFEQKNFVGQEHLVHLVNQLQQDMKEASPGLESKEQTAHYVTGRALRGSDKVFEKWGKLAPDAPFDLYDAEIKNVQRRNTRRFGSHDLFAKLAEPEYQALWREDASFLTRYAVYNSILRKLNHAKMFATFTLPDATAHPIWTRFDKLGGNLHQYTFLFNEFGERRHAIRFHKLLKVENGVAREVDDVTVPISMSEQLDNLLPRDPNEPIALYFRDYGAEQHFTGEFGGAKIQCRRDQLAHMHRRRGARDVYLNVSVRVQSQSEARGERRPPYAAVFRLVGDNHRAFVHFDKLSDYLAEHPDDGKLGSEGLLSGLRVMSVDLGLRTSASISVFRVARKDELKPNSKGRVPFFFPIKGNDNLVAVHERSQLLKLPGETESKDLRAIREERQRTLRQLRTQLAYLRLLVRCGSEDVGRRERSWAKLIEQPVDAANHMTPDWREAFENELQKLKSLHGICSDKEWMDAVYESVRRVWRHMGKQVRDWRKDVRSGERPKIRGYAKDVVGGNSIEQIEYLERQYKFLKSWSFFGKVSGQVIRAEKGSRFAITLREHIDHAKEDRLKKLADRIIMEALGYVYALDERGKGKWVAKYPPCQLILLEELSEYQFNNDRPPSENNQLMQWSHRGVFQELINQAQVHDLLVGTMYAAFSSRFDARTGAPGIRCRRVPARCTQEHNPEPFPWWLNKFVVEHTLDACPLRADDLIPTGEGEIFVSPFSAEEGDFHQIHADLNAAQNLQQRLWSDFDISQIRLRCDWGEVDGELVLIPRLTGKRTADSYSNKVFYTNTGVTYYERERGKKRRKVFAQEKLSEEEAELLVEADEAREKSVVLMRDPSGIINRGNWTRQKEFWSMVNQRIEGYLVKQIRSRVPLQDSACENTGDI

SEQ ID NO: 24 - protein, 1129 aa, Alicyclobacillus acidiphilus
MAVKSMKVKLRLDNMPEIRAGLWKLHTEVNAGVRYYTEWLSLLRQENLYRRSPNGDGEQECYKTAEECKAELLERLRARQVENGHCGPAGSDDELLQLARQLYELLVPQAIGAKGDAQQIARKFLSPLADKDAVGGLGIAKAGNKPRWVRMREAGEPGWEEEKAKAEARKSTDRTADVLRALADFGLKPLMRVYTDSDMSSVQWKPLRKGQAVRTWDRDMFQQAIERMMSWESWNQRVGEAYAKLVEQKSRFEQKNFVGQEHLVQLVNQLQQDMKEASHGLESKEQTAHYLTGRALRGSDKVFEKWEKLDPDAPFDLYDTEIKNVQRRNTRRFGSHDLFAKLAEPKYQALWREDASFLTRYAVYNSIVRKLNHAKMFATFTLPDATAHPIWTRFDKLGGNLHQYTFLFNEFGEGRHAIRFQKLLTVEDGVAKEVDDVTVPISMSAQLDDLLPRDPHELVALYFQDYGAEQHLAGEFGGAKIQYRRDQLNHLHARRGARDVYLNLSVRVQSQSEARGERRPPYAAVFRLVGDNHRAFVHFDKLSDYLAEHPDDGKLGSEGLLSGLRVMSVDLGLRTSASISVFRVARKDELKPNSEGRVPFCFPIEGNENLVAVHERSQLLKLPGETESKDLRAIREERQRTLRQLRTQLAYLRLLVRCGSEDVGRRERSWAKLIEQPMDANQMTPDWREAFEDELQKLKSLYGICGDREWTEAVYESVRRVWRHMGKQVRDWRKDVRSGERPKIRGYQKDVVGGNSIEQIEYLERQYKFLKSWSFFGKVSGQVIRAEKGSRFAITLREHIDHAKEDRLKKLADRIIMEALGYVYALDDERGKGKWVAKYPPCQLILLEELSEYQFNNDRPPSENNQLMQWSHRGVFQELLNQAQVHDLLVGTMYAAFSSRFDARTGAPGIRCRRVPARCAREQNPEPFPWWLNKFVAEHKLDGCPLRADDLIPTGEGEFFVSPFSAEEGDFHQIHADLNAAQNLQRRLWSDFDISQIRLRCDWGEVDGEPVLIPRTTGKRTADSYGNKVFYTKTGVTYYERERGKKRRKVFAQEELSEEEAELLVEADEAREKSVVLMRDPSGIINRGDWTRQKEFWSMVNQRIEGYLVKQIRSRVRLQESACENTGDI

SEQ ID NO: 25 - protein, 1140 aa, Bacillus hisashii
MAPKKKRKVGIHGVPAAATRSFILKIEPNEEVKKGLWKTHEVLNHGIAYYMNILKLIRQEAIYEHHEQDPKNPKKVSKAEIQAELWDFVLKMQKCNSFTHEVDKDEVFNILRELYEELVPSSVEKKGEANQLSNKFLYPLVDPNSQSGKGTASSGRKPRWYNLKIAGDPSWEEEKKKWEEDKKKDPLAKILGKLAEYGLIPLFIPYTDSNEPIVKEIKWMEKSRNQSVRRLDKDMFIQALERFLSWESWNLKVKEEYEKVEKEYKTLEERIKEDIQALKALEQYEKERQEQLLRDTLNTNEYRLSKRGLRGWREIIQKWLKMDENEPSEKYLEVFKDYQRKHPREAGDYSVYEFLSKKENHFIWRNHPEYPYLYATFCEIDKKKKDAKQQATFTLADPINHPLWVRFEERSGSNLNKYRILTEQLHTEKLKKKLTVQLDRLIYPTESGGWEEKGKVDIVLLPSRQFYNQIFLDIEEKGKHAFTYKDESIKFPLKGTLGGARVQFDRDHLRRYPHKVESGNVGRIYFNMTVNIEPTESPVSKSLKIHRDDFPKVVNFKPKELTEWIKDSKGKKLKSGIESLEIGLRVMSIDLGQRQAAAASIFEVVDQKPDIEGKLFFPIKGTELYAVHRASFNIKLPGETLVKSREVLRKAREDNLKLMNQKLNFLRNVLHFQQFEDITEREKRVTKWISRQENSDVPLVYQDELIQIRELMYKPYKDWVAFLKQLHKRLEVEIGKEVKHWRKSLSDGRKGLYGISLKNIDEIDRTRKFLLRWSLRPTEPGEVRRLEPGQRFAIDQLNHLNALKEDRLKKMANTIIMHALGYCYDVRKKKWQAKNPACQIILFEDLSNYNPYEERSRFENSKLMKWSRREIPRQVALQGEIYGLQVGEVGAQFSSRFHAKTGSPGIRCSVVTKEKLQDNRFFKNLQREGRLTLDKIAVLKEGDLYPDKGGEKFISLSKDRKCVTTHADINAAQNLQKRFWTRTHGFYKVYCKAYQVDGQTVYIPESKDQKQKIIEEFGEGYFILKDGVYEWVNAGKLKIKKGSSKQSSSELVDSDILKDSFDLASELKGEKLMLYRDPSGNVFPSDKWMAAGVFFGKLERILISKLTNQYSISTIEDDSSKQSMKRPAATKKAGQAKKKK

SEQ ID NO: 26 - protein, 1112 aa, Bacillus sp.
MAIRSIKLKMKTNSGTDSIYLRKALWRTHQLINEGIAYYMNLLTLYRQEAIGDKTKEAYQAELINIIRNQQRNNGSSEEHGSDQEILALLRQLYELIIPSSIGESGDANQLGNKFLYPLVDPNSQSGKGTSNAGRKPRWKRLKEEGNPDWELEKKKDEERKAKDPTVKIFDNLNKYGLLPLFPLFTNIQKDIEWLPLGKRQSVRKWDKDMFIQAIERLLSWESWNRRVADEYKQLKEKTESYYKEHLTGGEEWIEKIRKFEKERNMELEKNAFAPNDGYFITSRQIRGWDRVYEKWSKLPESASPEELWKVVAEQQNKMSEGFGDPKVFSFLANRENRDIWRGHSERIYHIAAYNGLQKKLSRTKEQATFTLPDAIEHPLWIRYESPGGTNLNLFKLEEKQKKNYYVTLSKIIWPSEEKWIEKENIEIPLAPSIQFNRQIKLKQHVKGKQEISFSDYSSRISLDGVLGGSRIQFNRKYIKNHKELLGEGDIGPVFFNLVVDVAPLQETRNGRLQSPIGKALKVISSDFSKVIDYKPKELMDWMNTGSASNSFGVASLLEGMRVMSIDMGQRTSASVSIFEVVKELPKDQEQKLFYSINDTELFAIHKRSFLLNLPGEVVTKNNKQQRQERRKKRQFVRSQIRMLANVLRLETKKTPDERKKAIHKLMEIVQSYDSWTASQKEVWEKELNLLTNMAAFNDEIWKESLVELHHRIEPYVGQIVSKWRKGLSEGRKNLAGISMWNIDELEDTRRLLISWSKRSRTPGEANRIETDEPFGSSLLQHIQNVKDDRLKQMANLIIMTALGFKYDKEEKDRYKRWKETYPACQIILFENLNRYLFNLDRSRRENSRLMKWAHRSIPRTVSMQGEMFGLQVGDVRSEYSSRFHAKTGAPGIRCHALTEEDLKAGSNTLKRLIEDGFINESELAYLKKGDIIPSQGGELFVTLSKRYKKDSDNNELTVIHADINAAQNLQKRFWQQNSEVYRVPCQLARMGEDKLYIPKSQTETIKKYFGKGSFVKNNTEQEVYKWEKSEKMKIKTDTTFDLQDLDGFEDISKTIELAQEQQKKYLTMFRDPSGYFFNNETWRPQKEYWSIVNNIIKSCLKKKILSNKVEL

SEQ ID NO: 27 - DNA, 306 bp, Artificial Sequence
  Description of Artificial Sequence: Synthetic polynucleotide
tgcctgtcatacgaaaccgagatactgacagtagaatatggccttctgccaatcgggaagattgtggagaaacggatagaatgcacagtttactctgtcgataacaatggtaacatttatactcagccagttgcccagtggcacgaccggggagagcaggaagtattcgaatactgtctggaggatggaagtctcattagggccactaaggaccacaaatttatgacagtcgatggccagatgctgcctatagacgaaatctttgagcgagagttggacctcatgcgagttgacaaccttcctaat

SEQ ID NO: 28 - protein, 102 aa, Artificial Sequence
  Description of Artificial Sequence: Synthetic polypeptide
CLSYETEILTVEYGLLPIGKIVEKRIECTVYSVDNNGNIYTQPVAQWHDRGEQEVFEYCLEDGSLIRATKDHKFMTVDGQMLPIDEIFERELDLMRVDNLPN

SEQ ID NO: 29 - DNA, 108 bp, Artificial Sequence
  Description of Artificial Sequence: Synthetic polynucleotide
atgatcaagatagctacaaggaagtatcttggcaaacaaaacgtttatgatattggagtcgaaagagatcacaactttgctctgaagaacggattcatagcttctaat

SEQ ID NO: 30 - protein, 36 aa, Artificial Sequence
  Description of Artificial Sequence: Synthetic polypeptide
MIKIATRKYLGKQNVYDIGVERDHNFALKNGFIASN

SEQ ID NO: 31 - DNA, 303 bp, Artificial Sequence
  Description of Artificial Sequence: Synthetic polynucleotide
tgcctgtcttatgataccgagatacttaccgttgaatatggcttcttgcctattggaaagattgtcgaagagagaattgaatgcacagtatatactgtagacaagaatggtttcgtttacacacagcccattgctcaatggcacaatcgcggcgaacaagaagtatttgagtactgtctcgaggatggaagcatcatacgagcaactaaagatcataaattcatgaccactgacgggcagatgttgccaatagatgagatattcgagcggggcttggatctcaaacaagtggatggattgcca

SEQ ID NO: 32 - protein, 101 aa, Artificial Sequence
  Description of Artificial Sequence: Synthetic polypeptide
CLSYDTEILTVEYGFLPIGKIVEERIECTVYTVDKNGFVYTQPIAQWHNRGEQEVFEYCLEDGSIIRATKDHKFMTTDGQMLPIDEIFERGLDLKQVDGLP

SEQ ID NO: 33 - DNA, 159 bp, Artificial Sequence
  Description of Artificial Sequence: Synthetic polynucleotide
atgaagaggactgccgatggatcagagtttgaatctcccaagaagaagaggaaagtaaagataatatctcgaaaaagtcttggtacccaaaatgtctatgatattggagtggagaaagatcacaacttccttctcaagaacggtctcgtagccagcaac

SEQ ID NO: 34 - protein, 53 aa, Artificial Sequence
  Description of Artificial Sequence: Synthetic polypeptide
MKRTADGSEFESPKKKRKVKIISRKSLGTQNVYDIGVEKDHNFLLKNGLVASN

SEQ ID NO: 35 - protein, 16 aa, Artificial Sequence
  Description of Artificial Sequence: Synthetic peptide
SGSETPGTSESATPES

SEQ ID NO: 36 - protein, 4 aa, Artificial Sequence
  Description of Artificial Sequence: Synthetic peptide
SGGS

SEQ ID NO: 37 - protein, 4 aa, Artificial Sequence
  Description of Artificial Sequence: Synthetic peptide
GGGS

SEQ ID NO: 38 - protein, 5 aa, Artificial Sequence
  Description of Artificial Sequence: Synthetic peptide
GGGGS

SEQ ID NO: 39 - protein, 5 aa, Artificial Sequence
  Description of Artificial Sequence: Synthetic peptide
EAAAK

SEQ ID NO: 40 - protein, 5 aa, Artificial Sequence
  Description of Artificial Sequence: Synthetic peptide
PAPAP

SEQ ID NO: 41 - protein, 6 aa, Artificial Sequence
  Description of Artificial Sequence: Synthetic peptide
PAPAPA

SEQ ID NO: 42 - protein, 7 aa, Artificial Sequence
  Description of Artificial Sequence: Synthetic peptide
PAPAPAP

SEQ ID NO: 43 - protein, 8 aa, Artificial Sequence
  Description of Artificial Sequence: Synthetic peptide
PAPAPAPA

SEQ ID NO: 44 - protein, 9 aa, Artificial Sequence
  Description of Artificial Sequence: Synthetic peptide
PAPAPAPAP

SEQ ID NO: 45 - protein, 15 aa, Artificial Sequence
  Description of Artificial Sequence: Synthetic peptide
PAPAPAPAPAPAPAP

SEQ ID NO: 46 - protein, 21 aa, Artificial Sequence
  Description of Artificial Sequence: Synthetic peptide
PAPAPAPAPAPAPAPAPAPAP

SEQ ID NO: 47 - protein, 24 aa, Artificial Sequence
  Description of Artificial Sequence: Synthetic peptide
SGGSSGSETPGTSESATPESSGGS

SEQ ID NO: 48 - protein, 32 aa, Artificial Sequence
  Description of Artificial Sequence: Synthetic polypeptide
SGGSSGGSSGSETPGTSESATPESSGGSSGGS

SEQ ID NO: 49 - protein, 104 aa, Artificial Sequence
  Description of Artificial Sequence: Synthetic polypeptide
GGSGGSPGSPAGSPTSTEEGTSESATPESGPGTSTEPSEGSAPGSPAGSPTSTEEGTSTEPSEGSAPGTSTEPSEGSAPGTSESATPESGPGSEPATSGGSGGS

SEQ ID NO: 50 - protein, 40 aa, Artificial Sequence
  Description of Artificial Sequence: Synthetic polypeptide
SGGSSGGSSGSETPGTSESATPESSGGSSGGSSGGSSGGS

SEQ ID NO: 51 - protein, 64 aa, Artificial Sequence
  Description of Artificial Sequence: Synthetic polypeptide
SGGSSGGSSGSETPGTSESATPESSGGSSGGSSGGSSGGSSGSETPGTSESATPESSGGSSGGS

SEQ ID NO: 52 - protein, 92 aa, Artificial Sequence
  Description of Artificial Sequence: Synthetic polypeptide
PGSPAGSPTSTEEGTSESATPESGPGTSTEPSEGSAPGSPAGSPTSTEEGTSTEPSEGSAPGTSTEPSEGSAPGTSESATPESGPGSEPATS

SEQ ID NO: 53 - protein, 18 aa, Unknown
  Description of Unknown: nuclear localization sequence
KRTADGSEFESPKKKRKV

SEQ ID NO: 54 - protein, 16 aa, Unknown
  Description of Unknown: nuclear localization sequence
KRPAATKKAGQAKKKK

SEQ ID NO: 55 - protein, 17 aa, Unknown
  Description of Unknown: nuclear localization sequence
KKTELQTTNAENKTKKL

SEQ ID NO: 56 - protein, 19 aa, Unknown
  Description of Unknown: nuclear localization sequence
KRGINDRNFWRGENGRKTR

SEQ ID NO: 57 - protein, 16 aa, Unknown
  Description of Unknown: nuclear localization sequence
RKSGKIAAIVVKRPRK

SEQ ID NO: 58 - protein, 7 aa, Unknown
  Description of Unknown: nuclear localization sequence
PKKKRKV

SEQ ID NO: 59 - protein, 30 aa, Unknown
  Description of Unknown: nuclear localization sequence
MDSLLMNRRKFLYQFKNVRWAKGRRETYLC

SEQ ID NO: 60 - protein, 84 aa, Bacillus phage PBS2
MTNLSDIIEKETGKQLVIQESILMLPEEVEEVIGNKPESDILVHTAYDESTDENVMLLTSDAPEYKPWALVIQDSNGENKIKML

SEQ ID NO: 61 - protein, 1368 aa, Streptococcus pyogenes [sequence omitted]

SEQ ID NO: 62 - RNA, 80 nt, Artificial Sequence
  Description of Artificial Sequence: Synthetic oligonucleotide
guuuuagagcuagaaauagcaaguuaaaauaaggcuaguccguuaucaacuugaaaaaguggcaccgagucggugcuuuu

SEQ ID NO: 63 - RNA, 80 nt, Artificial Sequence
  Description of Artificial Sequence: Synthetic oligonucleotide
guuuuagagcuagaaauagcaaguuaaaauaaggcuaguccguuaucaacuugaaaaagugggaccgagucggugcuuuu

SEQ ID NO: 64 - RNA, 125 nt, Artificial Sequence
  Description of Artificial Sequence: Synthetic polynucleotide
guuuuuguacucucaagauuuaaguaacuguacaacgaaacuuacacaguuacuuaaaucuugcagaagcuacaaagauaaggcuucaugccgaaaucaacacccugucauuuuauggcagggug

SEQ ID NO: 65 - RNA, 76 nt, Artificial Sequence
  Description of Artificial Sequence: Synthetic oligonucleotide
guuuuagagcuagaaauagcaaguuaaaauaaggcuaguccguuaucaacuugaaaaaguggcaccgagucggugc

SEQ ID NO: 66 - RNA, 84 nt, Artificial Sequence
  Description of Artificial Sequence: Synthetic oligonucleotide
guuuuaguacucuguaaugaaaauuacagaaucuacuaaaacaaggcaaaaugccguguuuaucucgucaacuuguuggcgaga

SEQ ID NO: 67 - DNA, 97 bp, Artificial Sequence
  Description of Artificial Sequence: Synthetic oligonucleotide
  Description of Combined DNA/RNA Molecule: Synthetic oligonucleotide
guucugtcuuuuggucaggacaaccgucuagcuauaagugcugcagggugugagaaacuccuauugcuggacgaugucucuuacgaggcauuagcac

SEQ ID NO: 68 - RNA, 88 nt, Artificial Sequence
  Description of Artificial Sequence: Synthetic oligonucleotide
gaccuauagggucaaugaaucugugcgugugccauaaguaauuaaaaauuacccaccacaggagcaccugaaaacaggugcuuggcac

SEQ ID NO: 69 - DNA, 4104 bp, Streptococcus pyogenes
atggataagaaatactcaataggcttagatatcggcacaaatagcgtcggatgggcggtgatcactgatgattataaggttccgtctaaaaagttcaaggttctgggaaatacagaccgccacagtatcaaaaaaaatcttataggggctcttttatttggcagtggagagacagcggaagcgactcgtctcaaacggacagctcgtagaaggtatacacgtcggaagaatcgtatttgttatctacaggagattttttcaaatgagatggcgaaagtagatgatagtttctttcatcgacttgaagagtcttttttggtggaagaagacaagaagcatgaacgtcatcctatttttggaaatatagtagatgaagttgcttatcatgagaaatatccaactatctatcatctgcgaaaaaaattggcagattctactgataaagcggatttgcgcttaatctatttggccttagcgcatatgattaagtttcgtggtcattttttgattgagggagatttaaatcctgataatagtgatgtggacaaactatttatccagttggtacaaatctacaatcaattatttgaagaaaaccctattaacgcaagtagagtagatgctaaagcgattctttctgcacgattgagtaaatcaagacgattagaaaatctcattgctcagctccccggtgagaagagaaatggcttgtttgggaatctcattgctttgtcattgggattgacccctaattttaaatcaaattttgatttggcagaagatgctaaattacagctttcaaaagatacttacgatgatgatttagataatttattggcgcaaattggagatcaatatgctgatttgtttttggcagctaagaatttatcagatgctattttactttcagatatcctaagagtaaatagtgaaataactaaggctcccctatcagcttcaatgattaagcgctacgatgaacatcatcaagacttgactcttttaaaagctttagttcgacaacaacttccagaaaagtataaagaaatcttttttgatcaatcaaaaaacggatatgcaggttatattgatgggggagctagccaagaagaattttataaatttatcaaaccaattttagaaaaaatggatggtactgaggaattattggtgaaactaaatcgtgaagatttgctgcgcaagcaacggacctttgacaacggctctattccccatcaaattcacttgggtgagctgcatgctattttgagaagacaagaagacttttatccatttttaaaagacaatcgtgagaagattgaaaaaatcttgacttttcgaattccttattatgttggtccattggcgcgtggcaatagtcgttttgcatggatgactcggaagtctgaagaaacaattaccccatggaattttgaagaagttgtcgataaaggtgcttcagctcaatcatttattgaacgcatgacaaactttgataaaaatcttccaaatgaaaaagtactaccaaaacatagtttgctttatgagtattttacggtttataacgaattgacaaaggtcaaatatgttactgagggaatgcgaaaaccagcatttctttcaggtgaacagaagaaagccattgttgatttactcttcaaaacaaatcgaaaagtaaccgttaagcaattaaaagaagattatttcaaaaaaatagaatgttttgatagtgttgaaatttcaggagttgaagatagatttaatgcttcattaggcgcctaccatgatttgctaaaaattattaaagataaagattttttggataatgaagaaaatgaagatatcttagaggatattgttttaacattgaccttatttgaagatagggggatgattgaggaaagacttaaaacatatgctcacctctttgatgataaggtgatgaaacagcttaaacgtcgccgttatactggttggggacgtttgtctcgaaaattgattaatggtattagggataagcaatctggcaaaacaatattagattttttgaaatcagatggttttgccaatcgcaattttatgcagctgatccatgatgatagtttgacatttaaagaagatattcaaaaagcacaggtgtctggacaaggccatagtttacatgaacagattgctaacttagctggcagtcctgctattaaaaaaggtattttacagactgtaaaaattgttgatgaactggtcaaagtaatggggcataagccagaaaatatcgttattgaaatggcacgtgaaaatcagacaactcaaaagggccagaaaaattcgcgagagcgtatgaaacgaatcgaagaaggtatcaaagaattaggaagtcagattcttaaagagcatcctgttgaaaatactcaattgcaaaatgaaaagctctatctctattatctacaaaatggaagagacatgtatgtggaccaagaattagatattaatcgtttaagtgattatgatgtcgatcacattgttccacaaagtttcattaaagacgattcaatagacaataaggtactaacgcgttctgataaaaatcgtggtaaatcggataacgttccaagtgaagaagtagtcaaaaagatgaaaaactattggagacaacttctaaacgccaagttaatcactcaacgtaagtttgataatttaacgaaagctgaacgtggaggtttgagtgaacttgataaagctggttttatcaaacgccaattggttgaaactcgccaaatcactaagcatgtggcacaaattttggatagtcgcatgaatactaaatacgatgaaaatgataaacttattcgagaggttaaagtgattaccttaaaatctaaattagtttctgacttccgaaaagatttccaattctataaagtacgtgagattaacaattaccatcatgcccatgatgcgtatctaaatgccgtcgttggaactgctttgattaagaaatatccaaaacttgaatcggagtttgtctatggtgattataaagtttatgatgttcgtaaaatgattgctaagtctgagcaagaaataggcaaagcaaccgcaaaatatttcttttactctaatatcatgaacttcttcaaaacagaaattacacttgcaaatggagagattcgcaaacgccctctaatcgaaactaatggggaaactggagaaattgtctgggataaagggcgagattttgccacagtgcgcaaagtattgtccatgccccaagtcaatattgtcaagaaaacagaagtacagacaggcggattctccaaggagtcaattttaccaaaaagaaattcggacaagcttattgctcgtaaaaaagactgggatccaaaaaaatatggtggttttgatagtccaacggtagcttattcagtcctagtggttgctaaggtggaaaaagggaaatcgaagaagttaaaatccgttaaagagttactagggatcacaattatggaaagaagttcctttgaaaaaaatccgattgactttttagaagctaaaggatataaggaagttaaaaaagacttaatcattaaactacctaaatatagtctttttgagttagaaaacggtcgtaaacggatgctggctagtgccggagaattacaaaaaggaaatgagctggctctgccaagcaaatatgtgaattttttatatttagctagtcattatgaaaagttgaagggtagtccagaagataacgaacaaaaacaattgtttgtggagcagcataagcattatttagatgagattattgagcaaatcagtgaattttctaagcgtgttattttagcagatgccaatttagataaagttcttagtgcatataacaaacatagagacaaaccaatacgtgaacaagcagaaaatattattcatttatttacgttgacgaatcttggagctcccgctgcttttaaatattttgatacaacaattgatcgtaaacgatatacgtctacaaaagaagttttagatgccactcttatccatcaatccatcactggtctttatgaaacacgcattgatttgagtcagctaggaggtgactga

SEQ ID NO: 70 - DNA, 4212 bp, Streptococcus pyogenes
atggataaaaagtattctattggtttagacatcggcactaattccgttggatgggctgtcataaccgatgaatacaaagtaccttcaaagaaatttaaggtgttggggaacacagaccgtcattcgattaaaaagaatcttatcggtgccctcctattcgatagtggcgaaacggcagaggcgactcgcctgaaacgaaccgctcggagaaggtatacacgtcgcaagaaccgaatatgttacttacaagaaatttttagcaatgagatggccaaagttgacgattctttctttcaccgtttggaagagtccttccttgtcgaagaggacaagaaacatgaacggcaccccatctttggaaacatagtagatgaggtggcatatcatgaaaagtacccaacgatttatcacctcagaaaaaagctagttgactcaactgataaagcggacctgaggttaatctacttggctcttgcccatatgataaagttccgtgggcactttctcattgagggtgatctaaatccggacaactcggatgtcgacaaactgttcatccagttagtacaaacctataatcagttgtttgaagagaaccctataaatgcaagtggcgtggatgcgaaggctattcttagcgcccgcctctctaaatcccgacggctagaaaacctgatcgcacaattacccggagagaagaaaaatgggttgttcggtaaccttatagcgctctcactaggcctgacaccaaattttaagtcgaacttcgacttagctgaagatgccaaattgcagcttagtaaggacacgtacgatgacgatctcgacaatctactggcacaaattggagatcagtatgcggacttatttttggctgccaaaaaccttagcgatgcaatcctcctatctgacatactgagagttaatactgagattaccaaggcgccgttatccgcttcaatgatcaaaaggtacgatgaacatcaccaagacttgacacttctcaaggccctagtccgtcagcaactgcctgagaaatataaggaaatattctttgatcagtcgaaaaacgggtacgcaggttatattgacggcggagcgagtcaagaggaattctacaagtttatcaaacccatattagagaagatggatgggacggaagagttgcttgtaaaactcaatcgcgaagatctactgcgaaagcagcggactttcgacaacggtagcattccacatcaaatccacttaggcgaattgcatgctatacttagaaggcaggaggatttttatccgttcctcaaagacaatcgtgaaaagattgagaaaatcctaacctttcgcataccttactatgtgggacccctggcccgagggaactctcggttcgcatggatgacaagaaagtccgaagaaacgattactccatggaattttgaggaagttgtcgataaaggtgcgtcagctcaatcgttcatcgagaggatgaccaactttgacaagaatttaccgaacgaaaaagtattgcctaagcacagtttactttacgagtatttcacagtgtacaatgaactcacgaaagttaagtatgtcactgagggcatgcgtaaacccgcctttctaagcggagaacagaagaaagcaatagtagatctgttattcaagaccaaccgcaaagtgacagttaagcaattgaaagaggactactttaagaaaattgaatgcttcgattctgtcgagatctccggggtagaagatcgatttaatgcgtcacttggtacgtatcatgacctcctaaagataattaaagataaggacttcctggataacgaagagaatgaagatatcttagaagatatagtgttgactcttaccctctttgaagatcgggaaatgattgaggaaagactaaaaacatacgctcacctgttcgacgataaggttatgaaacagttaaagaggcgtcgctatacgggctggggacgattgtcgcggaaacttatcaacgggataagagacaagcaaagtggtaaaactattctcgattttctaaagagcgacggcttcgccaataggaactttatgcagctgatccatgatgactctttaaccttcaaagaggatatacaaaaggcacaggtttccggacaaggggactcattgcacgaacatattgcgaatcttgctggttcgccagccatcaaaaagggcatactccagacagtcaaagtagtggatgagctagttaaggtcatgggacgtcacaaaccggaaaacattgtaatcgagatggcacgcgaaaatcaaacgactcagaaggggcaaaaaaacagtcgagagcggatgaagagaatagaagagggtattaaagaactgggcagccagatcttaaaggagcatcctgtggaaaatacccaattgcagaacgagaaactttacctctattacctacaaaatggaagggacatgtatgttgatcaggaactggacataaaccgtttatctgattacgacgtcgatcacattgtaccccaatcctttttgaaggacgattcaatcgacaataaagtgcttacacgctcggataagaaccgagggaaaagtgacaatgttccaagcgaggaagtcgtaaagaaaatgaagaactattggcggcagctcctaaatgcgaaactgataacgcaaagaaagttcgataacttaactaaagctgagaggggtggcttgtctgaacttgacaaggccggatttattaaacgtcagctcgtggaaacccgccaaatcacaaagcatgttgcacagatactagattcccgaatgaatacgaaatacgacgagaacgataagctgattcgggaagtcaaagtaatcactttaaagtcaaaattggtgtcggacttcagaaaggattttcaattctataaagttagggagataaataactaccaccatgcgcacgacgcttatcttaatgccgtcgtagggaccgcactcattaagaaatacccgaagctagaaagtgagtttgtgtatggtgattacaaagtttatgacgtccgtaagatgatcgcgaaaagcgaacaggagataggcaaggctacagccaaatacttcttttattctaacattatgaatttctttaagacggaaatcactctggcaaacggagagatacgcaaacgacctttaattgaaaccaatggggagacaggtgaaatcgtatgggataagggccgggacttcgcgacggtgagaaaagttttgtccatgccccaagtcaacatagtaaagaaaactgaggtgcagaccggagggttttcaaaggaatcgattcttccaaaaaggaatagtgataagctcatcgctcgtaaaaaggactgggacccgaaaaagtacggtggcttcgatagccctacagttgcctattctgtcctagtagtggcaaaagttgagaagggaaaatccaagaaactgaagtcagtcaaagaattattggggataacgattatggagcgctcgtcttttgaaaagaaccccatcgacttccttgaggcgaaaggttacaaggaagtaaaaaaggatctcataattaaactaccaaagtatagtctgtttgagttagaaaatggccgaaaacggatgttggctagcgccggagagcttcaaaaggggaacgaactcgcactaccgtctaaatacgtgaatttcctgtatttagcgtcccattacgagaagttgaaaggttcacctgaagataacgaacagaagcaactttttgttgagcagcacaaacattatctcgacgaaatcatagagcaaatttcggaattcagtaagagagtcatcctagctgatgccaatctggacaaagtattaagcgcatacaacaagcacagggataaacccatacgtgagcaggcggaaaatattatccatttgtttactcttaccaacctcggcgctccagccgcattcaagtattttgacacaacgatagatcgcaaacgatacacttctaccaaggaggtgctagacgcgacactgattcaccaatccatcacgggattatatgaaactcggatagatttgtcacagcttgggggtgacggatcccccaagaagaagaggaaagtctcgagcgactacaaagaccatgacggtgattataaagatcatgacatcgattacaaggatgacgatgacaaggctgcagga

SEQ ID NO: 71 - protein, 1368 aa, Streptococcus pyogenes
MDKKYSIGLAIGTNSVGWAVITDEYKVPSKKFKVLGNTDRHSIKKNLIGALLFDSGETAEATRLKRTARRRYTRRKNRICYLQEIFSNEMAKVDDSFFHRLEESFLVEEDKKHERHPIFGNIVDEVAYHEKYPTIYHLRKKLVDSTDKADLRLIYLALAHMIKFRGHFLIEGDLNPDNSDVDKLFIQLVQTYNQLFEENPINASGVDAKAILSARLSKSRRLENLIAQLPGEKKNGLFGNLIALSLGLTPNFKSNFDLAEDAKLQLSKDTYDDDLDNLLAQIGDQYADLFLAAKNLSDAILLSDILRVNTEITKAPLSASMIKRYDEHHQDLTLLKALVRQQLPEKYKEIFFDQSKNGYAGYIDGGASQEEFYKFIKPILEKMDGTEELLVKLNREDLLRKQRTFDNGSIPHQIHLGELHAILRRQEDFYPFLKDNREKIEKILTFRIPYYVGPLARGNSRFAWMTRKSEETITPWNFEEVVDKGASAQSFIERMTNFDKNLPNEKVLPKHSLLYEYFTVYNELTKVKYVTEGMRKPAFLSGEQKKAIVDLLFKTNRKVTVKQLKEDYFKKIECFDSVEISGVEDRFNASLGTYHDLLKIIKDKDFLDNEENEDILEDIVLTLTLFEDREMIEERLKTYAHLFDDKVMKQLKRRRYTGWGRLSRKLINGIRDKQSGKTILDFLKSDGFANRNFMQLIHDDSLTFKEDIQKAQVSGQGDSLHEHIANLAGSPAIKKGILQTVKVVDELVKVMGRHKPENIVIEMARENQTTQKGQKNSRERMKRIEEGIKELGSQILKEHPVENTQLQNEKLYLYYLQNGRDMYVDQELDINRLSDYDVDHIVPQSFLKDDSIDNKVLTRSDKNRGKSDNVPSEEVVKKMKNYWRQLLNAKLITQRKFDNLTKAERGGLSELDKAGFIKRQLVETRQITKHVAQILDSRMNTKYDENDKLIREVKVITLKSKLVSDFRKDFQFYKVREINNYHHAHDAYLNAVVGTALIKKYPKLESEFVYGDYKVYDVRKMIAKSEQEIGKATAKYFFYSNIMNFFKTEITLANGEIRKRPLIETNGETGEIVWDKGRDFATVRKVLSMPQVNIVKKTEVQTGGFSKESILPKRNSDKLIARKKDWDPKKYGGFDSPTVAYSVLVVAKVEKGKSKKLKSVKELLGITIMERSSFEKNPIDFLEAKGYKEVKKDLIIKLPKYSLFELENGRKRMLASAGELQKGNELALPSKYVNFLYLASHYEKLKGSPEDNEQKQLFVEQHKHYLDEIIEQISEFSKRVILADANLDKVLSAYNKHRDKPIREQAENIIHLFTLTNLGAPAAFKYFDTTIDRKRYTSTKEVLDATLIHQSITGLYETRIDLSQLGGD

SEQ ID NO: 72 - DNA, 4107 bp, Streptococcus pyogenes
atggataagaaatactcaataggcttagatatcggcacaaatagcgtcggatgggcggtgatcactgatgaatataaggttccgtctaaaaagttcaaggttctgggaaatacagaccgccacagtatcaaaaaaaatcttataggggctcttttatttgacagtggagagacagcggaagcgactcgtctcaaacggacagctcgtagaaggtatacacgtcggaagaatcgtatttgttatctacaggagattttttcaaatgagatggcgaaagtagatgatagtttctttcatcgacttgaagagtcttttttggtggaagaagacaagaagcatgaacgtcatcctatttttggaaatatagtagatgaagttgcttatcatgagaaatatccaactatctatcatctgcgaaaaaaattggtagattctactgataaagcggatttgcgcttaatctatttggccttagcgcatatgattaagtttcgtggtcattttttgattgagggagatttaaatcctgataatagtgatgtggacaaactatttatccagttggtacaaacctacaatcaattatttgaagaaaaccctattaacgcaagtggagtagatgctaaagcgattctttctgcacgattgagtaaatcaagacgattagaaaatctcattgctcagctccccggtgagaagaaaaatggcttatttgggaatctcattgctttgtcattgggtttgacccctaattttaaatcaaattttgatttggcagaagatgctaaattacagctttcaaaagatacttacgatgatgatttagataatttattggcgcaaattggagatcaatatgctgatttgtttttggcagctaagaatttatcagatgctattttactttcagatatcctaagagtaaatactgaaataactaaggctcccctatcagcttcaatgattaaacgctacgatgaacatcatcaagacttgactcttttaaaagctttagttcgacaacaacttccagaaaagtataaagaaatcttttttgatcaatcaaaaaacggatatgcaggttatattgatgggggagctagccaagaagaattttataaatttatcaaaccaattttagaaaaaatggatggtactgaggaattattggtgaaactaaatcgtgaagatttgctgcgcaagcaacggacctttgacaacggctctattccccatcaaattcacttgggtgagctgcatgctattttgagaagacaagaagacttttatccatttttaaaagacaatcgtgagaagattgaaaaaatcttgacttttcgaattccttattatgttggtccattggcgcgtggcaatagtcgttttgcatggatgactcggaagtctgaagaaacaattaccccatggaattttgaagaagttgtcgataaaggtgcttcagctcaatcatttattgaacgcatgacaaactttgataaaaatcttccaaatgaaaaagtactaccaaaacatagtttgctttatgagtattttacggtttataacgaattgacaaaggtcaaatatgttactgaaggaatgcgaaaaccagcatttctttcaggtgaacagaagaaagccattgttgatttactcttcaaaacaaatcgaaaagtaaccgttaagcaattaaaagaagattatttcaaaaaaatagaatgttttgatagtgttgaaatttcaggagttgaagatagatttaatgcttcattaggtacctaccatgatttgctaaaaattattaaagataaagattttttggataatgaagaaaatgaagatatcttagaggatattgttttaacattgaccttatttgaagatagggagatgattgaggaaagacttaaaacatatgctcacctctttgatgataaggtgatgaaacagcttaaacgtcgccgttatactggttggggacgtttgtctcgaaaattgattaatggtattagggataagcaatctggcaaaacaatattagattttttgaaatcagatggttttgccaatcgcaattttatgcagctgatccatgatgatagtttgacatttaaagaagacattcaaaaagcacaagtgtctggacaaggcgatagtttacatgaacatattgcaaatttagctggtagccctgctattaaaaaaggtattttacagactgtaaaagttgttgatgaattggtcaaagtaatggggcggcataagccagaaaatatcgttattgaaatggcacgtgaaaatcagacaactcaaaagggccagaaaaattcgcgagagcgtatgaaacgaatcgaagaaggtatcaaagaattaggaagtcagattcttaaagagcatcctgttgaaaatactcaattgcaaaatgaaaagctctatctctattatctccaaaatggaagagacatgtatgtggaccaagaattagatattaatcgtttaagtgattatgatgtcgatcacattgttccacaaagtttccttaaagacgattcaatagacaataaggtcttaacgcgttctgataaaaatcgtggtaaatcggataacgttccaagtgaagaagtagtcaaaaagatgaaaaactattggagacaacttctaaacgccaagttaatcactcaacgtaagtttgataatttaacgaaagctgaacgtggaggtttgagtgaacttgataaagctggttttatcaaacgccaattggttgaaactcgccaaatcactaagcatgtggcacaaattttggatagtcgcatgaatactaaatacgatgaaaatgataaacttattcgagaggttaaagtgattaccttaaaatctaaattagtttctgacttccgaaaagatttccaattctataaagtacgtgagattaacaattaccatcatgcccatgatgcgtatctaaatgccgtcgttggaactgctttgattaagaaatatccaaaacttgaatcggagtttgtctatggtgattataaagtttatgatgttcgtaaaatgattgctaagtctgagcaagaaataggcaaagcaaccgcaaaatatttcttttactctaatatcatgaacttcttcaaaacagaaattacacttgcaaatggagagattcgcaaacgccctctaatcgaaactaatggggaaactggagaaattgtctgggataaagggcgagattttgccacagtgcgcaaagtattgtccatgccccaagtcaatattgtcaagaaaacagaagtacagacaggcggattctccaaggagtcaattttaccaaaaagaaattcggacaagcttattgctcgtaaaaaagactgggatccaaaaaaatatggtggttttgatagtccaacggtagcttattcagtcctagtggttgctaaggtggaaaaagggaaatcgaagaagttaaaatccgttaaagagttactagggatcacaattatggaaagaagttcctttgaaaaaaatccgattgactttttagaagctaaaggatataaggaagttaaaaaagacttaatcattaaactacctaaatatagtctttttgagttagaaaacggtcgtaaacggatgctggctagtgccggagaattacaaaaaggaaatgagctggctctgccaagcaaatatgtgaattttttatatttagctagtcattatgaaaagttgaagggtagtccagaagataacgaacaaaaacaattgtttgtggagcagcataagcattatttagatgagattattgagcaaatcagtgaattttctaagcgtgttattttagcagatgccaatttagataaagttcttagtgcatataacaaacatagagacaaaccaatacgtgaacaagcagaaaatattattcatttatttacgttgacgaatcttggagctcccgctgcttttaaatattttgatacaacaattgatcgtaaacgatatacgtctacaaaagaagttttagatgccactcttatccatcaatccatcactggtctttatgaaacacgcattgatttgagtcagctaggaggtgactga

SEQ ID NO: 73 - protein, 1368 aa, Artificial Sequence
  Description of Artificial Sequence: Synthetic polypeptide
MDKKYSIGLAIGTNSVGWAVITDEYKVPSKKFKVLGNTDRHSIKKNLIGALLFDSGETAEATRLKRTARRRYTRRKNRICYLQEIFSNEMAKVDDSFFHRLEESFLVEEDKKHERHPIFGNIVDEVAYHEKYPTIYHLRKKLVDSTDKADLRLIYLALAHMIKFRGHFLIEGDLNPDNSDVDKLFIQLVQTYNQLFEENPINASGVDAKAILSARLSKSRRLENLIAQLPGEKKNGLFGNLIALSLGLTPNFKSNFDLAEDAKLQLSKDTYDDDLDNLLAQIGDQYADLFLAAKNLSDAILLSDILRVNTEITKAPLSASMIKRYDEHHQDLTLLKALVRQQLPEKYKEIFFDQSKNGYAGYIDGGASQEEFYKFIKPILEKMDGTEELLVKLNREDLLRKQRTFDNGSIPHQIHLGELHAILRRQEDFYPFLKDNREKIEKILTFRIPYYVGPLARGNSRFAWMTRKSEETITPWNFEEVVDKGASAQSFIERMTNFDKNLPNEKVLPKHSLLYEYFTVYNELTKVKYVTEGMRKPAFLSGEQKKAIVDLLFKTNRKVTVKQLKEDYFKKIECFDSVEISGVEDRFNASLGTYHDLLKIIKDKDFLDNEENEDILEDIVLTLTLFEDREMIEERLKTYAHLFDDKVMKQLKRRRYTGWGRLSRKLINGIRDKQSGKTILDFLKSDGFANRNFMQLIHDDSLTFKEDIQKAQVSGQGDSLHEHIANLAGSPAIKKGILQTVKVVDELVKVMGRHKPENIVIEMARENQTTQKGQKNSRERMKRIEEGIKELGSQILKEHPVENTQLQNEKLYLYYLQNGRDMYVDQELDINRLSDYDVDAIVPQSFLKDDSIDNKVLTRSDKNRGKSDNVPSEEVVKKMKNYWRQLLNAKLITQRKFDNLTKAERGGLSELDKAGFIKRQLVETRQITKHVAQILDSRMNTKYDENDKLIREVKVITLKSKLVSDFRKDFQFYKVREINNYHHAHDAYLNAVVGTALIKKYPKLESEFVYGDYKVYDVRKMIAKSEQEIGKATAKYFFYSNIMNFFKTEITLANGEIRKRPLIETNGETGEIVWDKGRDFATVRKVLSMPQVNIVKKTEVQTGGFSKESILPKRNSDKLIARKKDWDPKKYGGFDSPTVAYSVLVVAKVEKGKSKKLKSVKELLGITIMERSSFEKNPIDFLEAKGYKEVKKDLIIKLPKYSLFELENGRKRMLASAGELQKGNELALPSKYVNFLYLASHYEKLKGSPEDNEQKQLFVEQHKHYLDEIIEQISEFSKRVILADANLDKVLSAYNKHRDKPIREQAENIIHLFTLTNLGAPAAFKYFDTTIDRKRYTSTKEVLDATLIHQSITGLYETRIDLSQLGGD

SEQ ID NO: 74 - protein, 345 aa, Sulfolobus islandicus
MEVPLYNIFGDNYIIQVATEAENSTIYNNKVEIDDEELRNVLNLAYKIAKNNEDAAAERRGKAKKKKGEEGETTTSNIILPLSGNDKNPWTETLKCYNFPTTVALSEVFKNFSQVKECEEVSAPSFVKPEFYEFGRSPGMVERTRRVKLEVEPHYLIIAAAGWVLTRLGKAKVSEGDYVGVNVFTPTRGILYSLIQNVNGIVPGIKPETAFGLWIARKVVSSVTNPNVSVVRIYTISDAVGQNPTTINGGFSIDLTKLLEKRYLLSERLEAIARNALSISSNMRERYIVLANYIYEYLTGSKRLEDLLYFANRDLIMNLNSDDGKVRDLKLISAYVNGELIRGEG

SEQ ID NO: 75 - protein, 345 aa, Sulfolobus islandicus
MEVPLYNIFGDNYIIQVATEAENSTIYNNKVEIDDEELRNVLNLAYKIAKNNEDAAAERRGKAKKKKGEEGETTTSNIILPLSGNDKNPWTETLKCYNFPTTVALSEVFKNFSQVKECEEVSAPSFVKPEFYKFGRSPGMVERTRRVKLEVEPHYLIMAAAGWVLTRLGKAKVSEGDYVGVNVFTPTRGILYSLIQNVNGIVPGIKPETAFGLWIARKVVSSVTNPNVSVVSIYTISDAVGQNPTTINGGFSIDLTKLLEKRDLLSERLEAIARNALSISSNMRERYIVLANYIYEYLTGSKRLEDLLYFANRDLIMNLNSDDGKVRDLKLISAYVNGELIRGEG

SEQ ID NO: 76 - protein, 987 aa, Unknown
  Description of Unknown: Deltaproteobacteria CasX sequence
MEKRINKIRKKLSADNATKPVSRSGPMKTLLVRVMTDDLKKRLEKRRKKPEVMPQVISNNAANNLRMLLDDYTKMKEAILQVYWQEFKDDHVGLMCKFAQPASKKIDQNKLKPEMDEKGNLTTAGFACSQCGQPLFVYKLEQVSEKGKAYTNYFGRCNVAEHEKLILLAQLKPVKDSDEAVTYSLGKFGQRALDFYSIHVTKESTHPVKPLAQIAGNRYASGPVGKALSDACMGTIASFLSKYQDIIIEHQKVVKGNQKRLESLRELAGKENLEYPSVTLPPQPHTKEGVDFAYNEVIARVRMWVNLNLWQKLKLSRDDAKPLLRLKGFPSFPVVERRENEVDWWNTINEVKKLIDAKRDMGRVFWSGVTAEKRNTILEGYNYLPNENDHKKREGSLENPKKPAKRQFGDLLLYLEKKYAGDWGKVFDEAWERIDKKIAGLTSHIEREEARNAEDAQSKAVLTDWLRAKASFVLERLKEMDEKEFYACEIQLQKWYGDLRGNPFAVEAENRVVDISGFSIGSDGHSIQYRNLLAWKYLENGKREFYLLMNYGKKGRIRFTDGTDIKKSGKWQGLLYGGGKAKVIDLTFDPDDEQLIILPLAFGTRQGREFIWNDLLSLETGLIKLANGRVIEKTIYNKKIGRDEPALFVALTFERREVVDPSNIKPVNLIGVARGENIPAVIALTDPEGCPLPEFKDSSGGPTDILRIGEGYKEKQRAIQAAKEVEQRRAGGYSRKFASKSRNLADDMVRNSARDLFYHAVTHDAVLVFANLSRGFGRQGKRTFMTERQYTKMEDWLTAKLAYEGLTSKTYLSKTLAQYTSKTCSNCGFTITYADMDVMLVRLKKTSDGWATTLNNKELKAEYQITYYNRYKRQTVEKELSAELDRLSEESGNNDISKWTKGRRDEALFLLKKRFSHRPVQEQFVCLDCGHEVHAAEQAALNIARSWLFLNSNSTEFKSYKSGKQPFVGAWQAFYKRRLKEVWKPNA

SEQ ID NO: 77 - protein, 1210 aa, Unknown
  Description of Unknown: uncultured Parcubacteria group bacterium
MSKRHPRISGVKGYRLHAQRLEYTGKSGAMRTIKYPLYSSPSGGRTVPREIVSAINDDYVGLYGLSNFDDLYNAEKRNEEKVYSVLDFWYDCVQYGAVFSYTAPGLLKNVAEVRGGSYELTKTLKGSHLYDELQIDKVIKFLNKKEISRANGSLDKLKKDIIDCFKAEYRERHKDQCNKLADDIKNAKKDAGASLGERQKKLFRDFFGISEQSENDKPSFTNPLNLTCCLLPFDTVNNNRNRGEVLFNKLKEYAQKLDKNEGSLEMWEYIGIGNSGTAFSNFLGEGFLGRLRENKITELKKAMMDITDAWRGQEQEEELEKRLRILAALTIKLREPKFDNHWGGYRSDINGKLSSWLQNYINQTVKIKEDLKGHKKDLKKAKEMINRFGESDTKEEAVVSSLLESIEKIVPDDSADDEKPDIPAIAIYRRFLSDGRLTLNRFVQREDVQEALIKERLEAEKKKKPKKRKKKSDAEDEKETIDFKELFPHLAKPLKLVPNFYGDSKRELYKKYKNAAIYTDALWKAVEKIYKSAFSSSLKNSFFDTDFDKDFFIKRLQKIFSVYRRFNTDKWKPIVKNSFAPYCDIVSLAENEVLYKPKQSRSRKSAAIDKNRVRLPSTENIAKAGIALARELSVAGFDWKDLLKKEEHEEYIDLIELHKTALALLLAVTETQLDISALDFVENGTVKDFMKTRDGNLVLEGRFLEMFSQSIVFSELRGLAGLMSRKEFITRSAIQTMNGKQAELLYIPHEFQSAKITTPKEMSRAFLDLAPAEFATSLEPESLSEKSLLKLKQMRYYPHYFGYELTRTGQGIDGGVAENALRLEKSPVKKREIKCKQYKTLGRGQNKIVLYVRSSYYQTQFLEWFLHRPKNVQTDVAVSGSFLIDEKKVKTRWNYDALTVALEPVSGSERVFVSQPFTIFPEKSAEEEGQRYLGIDIGEYGIAYTALEITGDSAKILDQNFISDPQLKTLREEVKGLKLDQRRGTFAMPSTKIARIRESLVHSLRNRIHHLALKHKAKIVYELEVSRFEEGKQKIKKVYATLKKADVYSEIDADKNLQTTVWGKLAVASEISASYTSQFCGACKKLWRAEMQVDETITTQELIGTVRVIKGGTLIDAIKDFMRPPIFDENDTPFPKYRDFCDKHHISKKMRGNSCLFICPFCRANADADIQASQTIALLRYVKEEKKVEDYFERFRKLKNIKVLGQMKKI

SEQ ID NO: 78 - protein, 1082 aa, Neisseria meningitidis
MAAFKPNPINYILGLDIGIASVGWAMVEIDEDENPICLIDLGVRVFERAEVPKTGDSLAMARRLARSVRRLTRRRAHRLLRARRLLKREGVLQAADFDENGLIKSLPNTPWQLRAAALDRKLTPLEWSAVLLHLIKHRGYLSQRKNEGETADKELGALLKGVADNAHALQTGDFRTPAELALNKFEKESGHIRNQRGDYSHTFSRKDLQAELILLFEKQKEFGNPHVSGGLKEGIETLLMTQRPALSGDAVQKMLGHCTFEPAEPKAAKNTYTAERFIWLTKLNNLRILEQGSERPLTDTERATLMDEPYRKSKLTYAQARKLLGLEDTAFFKGLRYGKDNAEASTLMEMKAYHAISRALEKEGLKDKKSPLNLSPELQDEIGTAFSLFKTDEDITGRLKDRIQPEILEALLKHISFDKFVQISLKALRRIVPLMEQGKRYDEACAEIYGDHYGKKNTEEKIYLPPIPADEIRNPVVLRALSQARKVINGVVRRYGSPARIHIETAREVGKSFKDRKEIEKRQEENRKDREKAAAKFREYFPNFVGEPKSKDILKLRLYEQQHGKCLYSGKEINLGRLNEKGYVEIDHALPFSRTWDDSFNNKVLVLGSENQNKGNQTPYEYFNGKDNSREWQEFKARVETSRFPRSKKQRILLQKFDEDGFKERNLNDTRYVNRFLCQFVADRMRLTGKGKKRVFASNGQITNLLRGFWGLRKVRAENDRHHALDAVVVACSTVAMQQKITRFVRYKEMNAFDGKTIDKETGEVLHQKTHFPQPWEFFAQEVMIRVFGKPDGKPEFEEADTPEKLRTLLAEKLSSRPEAVHEYVTPLFVSRAPNRKMSGQGHMETVKSAKRLDEGVSVLRVPLTQLKLKDLEKMVNREREPKLYEALKARLEAHKDDPAKAFAEPFYKYDKAGNRTQQVKAVRVEQVQKTGVWVRNHNGIADNATMVRVDVFEKGDKYYLVPIYSWQVAKGILPDRAVVQGKDEEDWQLIDDSFNFKFSLHPNDLVEVITKKARMFGYFASCHRGTGNINIRIHDLDHKIGKNGILEGIGVKTALSFQKYQIDELGKEIRPCRLKKRPPVR

SEQ ID NO: 79 - protein, 1082 aa, Neisseria meningitidis
MAAFKPNPINYILGLDIGIASVGWAMVEIDEEENPIRLIDLGVRVFERAEVPKTGDSLAMARRLARSVRRLTRRRAHRLLRARRLLKREGVLQAADFDENGLIKSLPNTPWQLRAAALDRKLTPLEWSAVLLHLIKHRGYLSQRKNEGETADKELGALLKGVANNAHALQTGDFRTPAELALNKFEKESGHIRNQRGDYSHTFSRKDLQAELILLFEKQKEFGNPHVSGGLKEGIETLLMTQRPALSGDAVQKMLGHCTFEPAEPKAAKNTYTAERFIWLTKLNNLRILEQGSERPLTDTERATLMDEPYRKSKLTYAQARKLLGLEDTAFFKGLRYGKDNAEASTLMEMKAYHAISRALEKEGLKDKKSPLNLSSELQDEIGTAFSLFKTDEDITGRLKDRVQPEILEALLKHISFDKFVQISLKALRRIVPLMEQGKRYDEACAEIYGDHYGKKNTEEKIYLPPIPADEIRNPVVLRALSQARKVINGVVRRYGSPARIHIETAREVGKSFKDRKEIEKRQEENRKDREKAAAKFREYFPNFVGEPKSKDILKLRLYEQQHGKCLYSGKEINLVRLNEKGYVEIDHALPFSRTWDDSFNNKVLVLGSENQNKGNQTPYEYFNGKDNSREWQEFKARVETSRFPRSKKQRILLQKFDEDGFKECNLNDTRYVNRFLCQFVADHILLTGKGKRRVFASNGQITNLLRGFWGLRKVRAENDRHHALDAVVVACSTVAMQQKITRFVRYKEMNAFDGKTIDKETGKVLHQKTHFPQPWEFFAQEVMIRVFGKPDGKPEFEEADTPEKLRTLLAEKLSSRPEAVHEYVTPLFVSRAPNRKMSGAHKDTLRSAKRFVKHNEKISVKRVWLTEIKLADLENMVNYKNGREIELYEALKARLEAYGGNAKQAFDPKDNPFYKKGGQLVKAVRVEKTQESGVLLNKKNAYTIADNGDMVRVDVFCKVDKKGKNQYFIVPIYAWQVAENILPDIDCKGYRIDDSYTFCFSLHKYDLIAFQKDEKSKVEFAYYINCDSSNGRFYLAWHDKGSKEQQFRISTQNLVLIQKYQVNELGKEIRPCRLKKRPPVR

SEQ ID NO: 80 - DNA, 117 bp, Artificial Sequence
  Description of Artificial Sequence: Synthetic oligonucleotide
  Description of Combined DNA/RNA Molecule: Synthetic oligonucleotide
  modified_base (98)..(117): a, c, t, g, unknown or other
guucugtcuuuuggucaggacaaccgucuagcuauaagugcugcagggugugagaaacuccuauugcuggacgaugucucuuacgaggcauuagcacnnnnnnnnnnnnnnnnnnnn

SEQ ID NO: 81 - RNA, 108 nt, Artificial Sequence
  Description of Artificial Sequence: Synthetic polynucleotide
  modified_base (89)..(108): a, c, u, g, unknown or other
gaccuauagggucaaugaaucugugcgugugccauaaguaauuaaaaauuacccaccacaggagcaccugaaaacaggugcuuggcacnnnnnnnnnnnnnnnnnnnn

SEQ ID NO: 82 - RNA, 119 nt, Artificial Sequence
  Description of Artificial Sequence: Synthetic polynucleotide
  modified_base (100)..(119): a, c, u, g, unknown or other
gucuaaaggacagaauuuuucaacgggugugccaauggccacuuuccagguggcaaagcccguugaacuucucaaaaagaacgaucugagaaguggcacnnnnnnnnnnnnnnnnnnnn

SEQ ID NO: 83 - protein, 1300 aa, Francisella novicida
MSIYQEFVNKYSLSKTLRFELIPQGKTLENIKARGLILDDEKRAKDYKKAKQIIDKYHQFFIEEILSSVCISEDLLQNYSDVYFKLKKSDDDNLQKDFKSAKDTIKKQISEYIKDSEKFKNLFNQNLIDAKKGQESDLILWLKQSKDNGIELFKANSDITDIDEALEIIKSFKGWTTYFKGFHENRKNVYSSNDIPTSIIYRIVDDNLPKFLENKAKYESLKDKAPEAINYEQIKKDLAEELTFDIDYKTSEVNQRVFSLDEVFEIANFNNYLNQSGITKFNTIIGGKFVNGENTKRKGINEYINLYSQQINDKTLKKYKMSVLFKQILSDTESKSFVIDKLEDDSDVVTTMQSFYEQIAAFKTVEEKSIKETLSLLFDDLKAQKLDLSKIYFKNDKSLTDLSQQVFDDYSVIGTAVLEYITQQIAPKNLDNPSKKEQELIAKKTEKAKYLSLETIKLALEEFNKHRDIDKQCRFEEILANFAAIPMIFDEIAQNKDNLAQISIKYQNQGKKDLLQASAEDDVKAIKDLLDQTNNLLHKLKIFHISQSEDKANILDKDEHFYLVFEECYFELANIVPLYNKIRNYITQKPYSDEKFKLNFENSTLANGWDKNKEPDNTAILFIKDDKYYLGVMNKKNNKIFDDKAIKENKGEGYKKIVYKLLPGANKMLPKVFFSAKSIKFYNPSEDILRIRNHSTHTKNGSPQKGYEKFEFNIEDCRKFIDFYKQSISKHPEWKDFGFRFSDTQRYNSIDEFYREVENQGYKLTFENISESYIDSVVNQGKLYLFQIYNKDFSAYSKGRPNLHTLYWKALFDERNLQDVVYKLNGEAELFYRKQSIPKKITHPAKEAIANKNKDNPKKESVFEYDLIKDKRFTEDKFFFHCPITINFKSSGANKFNDEINLLLKEKANDVHILSIDRGERHLAYYTLVDGKGNIIKQDTFNIIGNDRMKTNYHDKLAAIEKDRDSARKDWKKINNIKEMKEGYLSQVVHEIAKLVIEYNAIVVFEDLNFGFKRGRFKVEKQVYQKLEKMLIEKLNYLVFKDNEFDKTGGVLRAYQLTAPFETFKKMGKQTGIIYYVPAGFTSKICPVTGFVNQLYPKYESVSKSQEFFSKFDKICYNLDKGYFEFSFDYKNFGDKAAKGKWTIASFGSRLINFRNSDKNHNWDTREVYPTKELEKLLKDYSIEYGHGECIKAAICGESDKKFFAKLTSVLNTILQMRNSKTGTELDYLISPVADVNGNFFDSRQAPKNMPQDADANGAYHIGLKGLMLLGRIKNNQEGKKLNLVIKNEEYFEFVQNRNN

SEQ ID NO: 84 - protein, 1300 aa, Francisella novicida
MSIYQEFVNKYSLSKTLRFELIPQGKTLENIKARGLILDDEKRAKDYKKAKQIIDKYHQFFIEEILSSVCISEDLLQNYSDVYFKLKKSDDDNLQKDFKSAKDTIKKQISEYIKDSEKFKNLFNQNLIDAKKGQESDLILWLKQSKDNGIELFKANSDITDIDEALEIIKSFKGWTTYFKGFHENRKNVYSSNDIPTSIIYRIVDDNLPKFLENKAKYESLKDKAPEAINYEQIKKDLAEELTFDIDYKTSEVNQRVFSLDEVFEIANFNNYLNQSGITKFNTIIGGKFVNGENTKRKGINEYINLYSQQINDKTLKKYKMSVLFKQILSDTESKSFVIDKLEDDSDVVTTMQSFYEQIAAFKTVEEKSIKETLSLLFDDLKAQKLDLSKIYFKNDKSLTDLSQQVFDDYSVIGTAVLEYITQQIAPKNLDNPSKKEQELIAKKTEKAKYLSLETIKLALEEFNKHRDIDKQCRFEEILANFAAIPMIFDEIAQNKDNLAQISIKYQNQGKKDLLQASAEDDVKAIKDLLDQTNNLLHKLKIFHISQSEDKANILDKDEHFYLVFEECYFELANIVPLYNKIRNYITQKPYSDEKFKLNFENSTLANGWDKNKEPDNTAILFIKDDKYYLGVMNKKNNKIFDDKAIKENKGEGYKKIVYKLLPGANKMLPKVFFSAKSIKFYNPSEDILRIRNHSTHTKNGSPQKGYEKFEFNIEDCRKFIDFYKQSISKHPEWKDFGFRFSDTQRYNSIDEFYREVENQGYKLTFENISESYIDSVVNQGKLYLFQIYNKDFSAYSKGRPNLHTLYWKALFDERNLQDVVYKLNGEAELFYRKQSIPKKITHPAKEAIANKNKDNPKKESVFEYDLIKDKRFTEDKFFFHCPITINFKSSGANKFNDEINLLLKEKANDVHILSIARGERHLAYYTLVDGKGNIIKQDTFNIIGNDRMKTNYHDKLAAIEKDRDSARKDWKKINNIKEMKEGYLSQVVHEIAKLVIEYNAIVVFEDLNFGFKRGRFKVEKQVYQKLEKMLIEKLNYLVFKDNEFDKTGGVLRAYQLTAPFETFKKMGKQTGIIYYVPAGFTSKICPVTGFVNQLYPKYESVSKSQEFFSKFDKICYNLDKGYFEFSFDYKNFGDKAAKGKWTIASFGSRLINFRNSDKNHNWDTREVYPTKELEKLLKDYSIEYGHGECIKAAICGESDKKFFAKLTSVLNTILQMRNSKTGTELDYLISPVADVNGNFFDSRQAPKNMPQDADANGAYHIGLKGLMLLGRIKNNQEGKKLNLVIKNEEYFEFVQNRNN

SEQ ID NO: 85 - protein, 1300 aa, Francisella novicida
MSIYQEFVNKYSLSKTLRFELIPQGKTLENIKARGLILDDEKRAKDYKKAKQIIDKYHQFFIEEILSSVCISEDLLQNYSDVYFKLKKSDDDNLQKDFKSAKDTIKKQISEYIKDSEKFKNLFNQNLIDAKKGQESDLILWLKQSKDNGIELFKANSDITDIDEALEIIKSFKGWTTYFKGFHENRKNVYSSNDIPTSIIYRIVDDNLPKFLENKAKYESLKDKAPEAINYEQIKKDLAEELTFDIDYKTSEVNQRVFSLDEVFEIANFNNYLNQSGITKFNTIIGGKFVNGENTKRKGINEYINLYSQQINDKTLKKYKMSVLFKQILSDTESKSFVIDKLEDDSDVVTTMQSFYEQIAAFKTVEEKSIKETLSLLFDDLKAQKLDLSKIYFKNDKSLTDLSQQVFDDYSVIGTAVLEYITQQIAPKNLDNPSKKEQELIAKKTEKAKYLSLETIKLALEEFNKHRDIDKQCRFEEILANFAAIPMIFDEIAQNKDNLAQISIKYQNQGKKDLLQASAEDDVKAIKDLLDQTNNLLHKLKIFHISQSEDKANILDKDEHFYLVFEECYFELANIVPLYNKIRNYITQKPYSDEKFKLNFENSTLANGWDKNKEPDNTAILFIKDDKYYLGVMNKKNNKIFDDKAIKENKGEGYKKIVYKLLPGANKMLPKVFFSAKSIKFYNPSEDILRIRNHSTHTKNGSPQKGYEKFEFNIEDCRKFIDFYKQSISKHPEWKDFGFRFSDTQRYNSIDEFYREVENQGYKLTFENISESYIDSVVNQGKLYLFQIYNKDFSAYSKGRPNLHTLYWKALFDERNLQDVVYKLNGEAELFYRKQSIPKKITHPAKEAIANKNKDNPKKESVFEYDLIKDKRFTEDKFFFHCPITINFKSSGANKFNDEINLLLKEKANDVHILSIDRGERHLAYYTLVDGKGNIIKQDTFNIIGNDRMKTNYHDKLAAIEKDRDSARKDWKKINNIKEMKEGYLSQVVHEIAKLVIEYNAIVVFADLNFGFKRGRFKVEKQVYQKLEKMLIEKLNYLVFKDNEFDKTGGVLRAYQLTAPFETFKKMGKQTGIIYYVPAGFTSKICPVTGFVNQLYPKYESVSKSQEFFSKFDKICYNLDKGYFEFSFDYKNFGDKAAKGKWTIASFGSRLINFRNSDKNHNWDTREVYPTKELEKLLKDYSIEYGHGECIKAAICGESDKKFFAKLTSVLNTILQMRNSKTGTELDYLISPVADVNGNFFDSRQAPKNMPQDADANGAYHIGLKGLMLLGRIKNNQEGKKLNLVIKNEEYFEFVQNRNN

SEQ ID NO: 86 - protein, 1300 aa, Francisella novicida
MSIYQEFVNKYSLSKTLRFELIPQGKTLENIKARGLILDDEKRAKDYKKAKQIIDKYHQFFIEEILSSVCISEDLLQNYSDVYFKLKKSDDDNLQKDFKSAKDTIKKQISEYIKDSEKFKNLFNQNLIDAKKGQESDLILWLKQSKDNGIELFKANSDITDIDEALEIIKSFKGWTTYFKGFHENRKNVYSSNDIPTSIIYRIVDDNLPKFLENKAKYESLKDKAPEAINYEQIKKDLAEELTFDIDYKTSEVNQRVFSLDEVFEIANFNNYLNQSGITKFNTIIGGKFVNGENTKRKGINEYINLYSQQINDKTLKKYKMSVLFKQILSDTESKSFVIDKLEDDSDVVTTMQSFYEQIAAFKTVEEKSIKETLSLLFDDLKAQKLDLSKIYFKNDKSLTDLSQQVFDDYSVIGTAVLEYITQQIAPKNLDNPSKKEQELIAKKTEKAKYLSLETIKLALEEFNKHRDIDKQCRFEEILANFAAIPMIFDEIAQNKDNLAQISIKYQNQGKKDLLQASAEDDVKAIKDLLDQTNNLLHKLKIFHISQSEDKANILDKDEHFYLVFEECYFELANIVPLYNKIRNYITQKPYSDEKFKLNFENSTLANGWDKNKEPDNTAILFIKDDKYYLGVMNKKNNKIFDDKAIKENKGEGYKKIVYKLLPGANKMLPKVFFSAKSIKFYNPSEDILRIRNHSTHTKNGSPQKGYEKFEFNIEDCRKFIDFYKQSISKHPEWKDFGFRFSDTQRYNSIDEFYREVENQGYKLTFENISESYIDSVVNQGKLYLFQIYNKDFSAYSKGRPNLHTLYWKALFDERNLQDVVYKLNGEAELFYRKQSIPKKITHPAKEAIANKNKDNPKKESVFEYDLIKDKRFTEDKFFFHCPITINFKSSGANKFNDEINLLLKEKANDVHILSIDRGERHLAYYTLVDGKGNIIKQDTFNIIGNDRMKTNYHDKLAAIEKDRDSARKDWKKINNIKEMKEGYLSQVVHEIAKLVIEYNAIVVFEDLNFGFKRGRFKVEKQVYQKLEKMLIEKLNYLVFKDNEFDKTGGVLRAYQLTAPFETFKKMGKQTGIIYYVPAGFTSKICPVTGFVNQLYPKYESVSKSQEFFSKFDKICYNLDKGYFEFSFDYKNFGDKAAKGKWTIASFGSRLINFRNSDKNHNWDTREVYPTKELEKLLKDYSIEYGHGECIKAAICGESDKKFFAKLTSVLNTILQMRNSKTGTELDYLISPVADVNGNFFDSRQAPKNMPQDAAANGAYHIGLKGLMLLGRIKNNQEGKKLNLVIKNEEYFEFVQNRNN

SEQ ID NO: 87 - protein, 1300 aa, Francisella novicida
MSIYQEFVNKYSLSKTLRFELIPQGKTLENIKARGLILDDEKRAKDYKKAKQIIDKYHQFFIEEILSSVCISEDLLQNYSDVYFKLKKSDDDNLQKDFKSAKDTIKKQISEYIKDSEKFKNLFNQNLIDAKKGQESDLILWLKQSKDNGIELFKANSDITDIDEALEIIKSFKGWTTYFKGFHENRKNVYSSNDIPTSIIYRIVDDNLPKFLENKAKYESLKDKAPEAINYEQIKKDLAEELTFDIDYKTSEVNQRVFSLDEVFEIANFNNYLNQSGITKFNTIIGGKFVNGENTKRKGINEYINLYSQQINDKTLKKYKMSVLFKQILSDTESKSFVIDKLEDDSDVVTTMQSFYEQIAAFKTVEEKSIKETLSLLFDDLKAQKLDLSKIYFKNDKSLTDLSQQVFDDYSVIGTAVLEYITQQIAPKNLDNPSKKEQELIAKKTEKAKYLSLETIKLALEEFNKHRDIDKQCRFEEILANFAAIPMIFDEIAQNKDNLAQISIKYQNQGKKDLLQASAEDDVKAIKDLLDQTNNLLHKLKIFHISQSEDKANILDKDEHFYLVFEECYFELANIVPLYNKIRNYITQKPYSDEKFKLNFENSTLANGWDKNKEPDNTAILFIKDDKYYLGVMNKKNNKIFDDKAIKENKGEGYKKIVYKLLPGANKMLPKVFFSAKSIKFYNPSEDILRIRNHSTHTKNGSPQKGYEKFEFNIEDCRKFIDFYKQSISKHPEWKDFGFRFSDTQRYNSIDEFYREVENQGYKLTFENISESYIDSVVNQGKLYLFQIYNKDFSAYSKGRPNLHTLYWKALFDERNLQDVVYKLNGEAELFYRKQSIPKKITHPAKEAIANKNKDNPKKESVFEYDLIKDKRFTEDKFFFHCPITINFKSSGANKFNDEINLLLKEKANDVHILSIARGERHLAYYTLVDGKGNIIKQDTFNIIGNDRMKTNYHDKLAAIEKDRDSARKDWKKINNIKEMKEGYLSQVVHEIAKLVIEYNAIVVFADLNFGFKRGRFKVEKQVYQKLEKMLIEKLNYLVFKDNEFDKTGGVLRAYQLTAPFETFKKMGKQTGIIYYVPAGFTSKICPVTGFVNQLYPKYESVSKSQEFFSKFDKICYNLDKGYFEFSFDYKNFGDKAAKGKWTIASFGSRLINFRNSDKNHNWDTREVYPTKELEKLLKDYSIEYGHGECIKAAICGESDKKFFAKLTSVLNTILQMRNSKTGTELDYLISPVADVNGNFFDSRQAPKNMPQDADANGAYHIGLKGLMLLGRIKNNQEGKKLNLVIKNEEYFEFVQNRNN

SEQ ID NO: 88 - protein, 1300 aa, Francisella novicida
MSIYQEFVNKYSLSKTLRFELIPQGKTLENIKARGLILDDEKRAKDYKKAKQIIDKYHQFFIEEILSSVCISEDLLQNYSDVYFKLKKSDDDNLQKDFKSAKDTIKKQISEYIKDSEKFKNLFNQNLIDAKKGQESDLILWLKQSKDNGIELFKANSDITDIDEALEIIKSFKGWTTYFKGFHENRKNVYSSNDIPTSIIYRIVDDNLPKFLENKAKYESLKDKAPEAINYEQIKKDLAEELTFDIDYKTSEVNQRVFSLDEVFEIANFNNYLNQSGITKFNTIIGGKFVNGENTKRKGINEYINLYSQQINDKTLKKYKMSVLFKQILSDTESKSFVIDKLEDDSDVVTTMQSFYEQIAAFKTVEEKSIKETLSLLFDDLKAQKLDLSKIYFKNDKSLTDLSQQVFDDYSVIGTAVLEYITQQIAPKNLDNPSKKEQELIAKKTEKAKYLSLETIKLALEEFNKHRDIDKQCRFEEILANFAAIPMIFDEIAQNKDNLAQISIKYQNQGKKDLLQASAEDDVKAIKDLLDQTNNLLHKLKIFHISQSEDKANILDKDEHFYLVFEECYFELANIVPLYNKIRNYITQKPYSDEKFKLNFENSTLANGWDKNKEPDNTAILFIKDDKYYLGVMNKKNNKIFDDKAIKENKGEGYKKIVYKLLPGANKMLPKVFFSAKSIKFYNPSEDILRIRNHSTHTKNGSPQKGYEKFEFNIEDCRKFIDFYKQSISKHPEWKDFGFRFSDTQRYNSIDEFYREVENQGYKLTFENISESYIDSVVNQGKLYLFQIYNKDFSAYSKGRPNLHTLYWKALFDERNLQDVVYKLNGEAELFYRKQSIPKKITHPAKEAIANKNKDNPKKESVFEYDLIKDKRFTEDKFFFHCPITINFKSSGANKFNDEINLLLKEKANDVHILSIARGERHLAYYTLVDGKGNIIKQDTFNIIGNDRMKTNYHDKLAAIEKDRDSARKDWKKINNIKEMKEGYLSQVVHEIAKLVIEYNAIVVFEDLNFGFKRGRFKVEKQVYQKLEKMLIEKLNYLVFKDNEFDKTGGVLRAYQLTAPFETFKKMGKQTGIIYYVPAGFTSKICPVTGFVNQLYPKYESVSKSQEFFSKFDKICYNLDKGYFEFSFDYKNFGDKAAKGKWTIASFGSRLINFRNSDKNHNWDTREVYPTKELEKLLKDYSIEYGHGECIKAAICGESDKKFFAKLTSVLNTILQMRNSKTGTELDYLISPVADVNGNFFDSRQAPKNMPQDAAANGAYHIGLKGLMLLGRIKNNQEGKKLNLVIKNEEYFEFVQNRNN

SEQ ID NO: 89 - protein, 1300 aa, Francisella novicida
MSIYQEFVNKYSLSKTLRFELIPQGKTLENIKARGLILDDEKRAKDYKKAKQIIDKYHQFFIEEILSSVCISEDLLQNYSDVYFKLKKSDDDNLQKDFKSAKDTIKKQISEYIKDSEKFKNLFNQNLIDAKKGQESDLILWLKQSKDNGIELFKANSDITDIDEALEIIKSFKGWTTYFKGFHENRKNVYSSNDIPTSIIYRIVDDNLPKFLENKAKYESLKDKAPEAINYEQIKKDLAEELTFDIDYKTSEVNQRVFSLDEVFEIANFNNYLNQSGITKFNTIIGGKFVNGENTKRKGINEYINLYSQQINDKTLKKYKMSVLFKQILSDTESKSFVIDKLEDDSDVVTTMQSFYEQIAAFKTVEEKSIKETLSLLFDDLKAQKLDLSKIYFKNDKSLTDLSQQVFDDYSVIGTAVLEYITQQIAPKNLDNPSKKEQELIAKKTEKAKYLSLETIKLALEEFNKHRDIDKQCRFEEILANFAAIPMIFDEIAQNKDNLAQISIKYQNQGKKDLLQASAEDDVKAIKDLLDQTNNLLHKLKIFHISQSEDKANILDKDEHFYLVFEECYFELANIVPLYNKIRNYITQKPYSDEKFKLNFENSTLANGWDKNKEPDNTAILFIKDDKYYLGVMNKKNNKIFDDKAIKENKGEGYKKIVYKLLPGANKMLPKVFFSAKSIKFYNPSEDILRIRNHSTHTKNGSPQKGYEKFEFNIEDCRKFIDFYKQSISKHPEWKDFGFRFSDTQRYNSIDEFYREVENQGYKLTFENISESYIDSVVNQGKLYLFQIYNKDFSAYSKGRPNLHTLYWKALFDERNLQDVVYKLNGEAELFYRKQSIPKKITHPAKEAIANKNKDNPKKESVFEYDLIKDKRFTEDKFFFHCPITINFKSSGANKFNDEINLLLKEKANDVHILSIDRGERHLAYYTLVDGKGNIIKQDTFNIIGNDRMKTNYHDKLAAIEKDRDSARKDWKKINNIKEMKEGYLSQVVHEIAKLVIEYNAIVVFADLNFGFKRGRFKVEKQVYQKLEKMLIEKLNYLVFKDNEFDKTGGVLRAYQLTAPFETFKKMGKQTGIIYYVPAGFTSKICPVTGFVNQLYPKYESVSKSQEFFSKFDKICYNLDKGYFEFSFDYKNFGDKAAKGKWTIASFGSRLINFRNSDKNHNWDTREVYPTKELEKLLKDYSIEYGHGECIKAAICGESDKKFFAKLTSVLNTILQMRNSKTGTELDYLISPVADVNGNFFDSRQAPKNMPQDAAANGAYHIGLKGLMLLGRIKNNQEGKKLNLVIKNEEYFEFVQNRNN

SEQ ID NO: 90 - protein, 1300 aa, Francisella novicida
MSIYQEFVNKYSLSKTLRFELIPQGKTLENIKARGLILDDEKRAKDYKKAKQIIDKYHQFFIEEILSSVCISEDLLQNYSDVYFKLKKSDDDNLQKDFKSAKDTIKKQISEYIKDSEKFKNLFNQNLIDAKKGQESDLILWLKQSKDNGIELFKANSDITDIDEALEIIKSFKGWTTYFKGFHENRKNVYSSNDIPTSIIYRIVDDNLPKFLENKAKYESLKDKAPEAINYEQIKKDLAEELTFDIDYKTSEVNQRVFSLDEVFEIANFNNYLNQSGITKFNTIIGGKFVNGENTKRKGINEYINLYSQQINDKTLKKYKMSVLFKQILSDTESKSFVIDKLEDDSDVVTTMQSFYEQIAAFKTVEEKSIKETLSLLFDDLKAQKLDLSKIYFKNDKSLTDLSQQVFDDYSVIGTAVLEYITQQIAPKNLDNPSKKEQELIAKKTEKAKYLSLETIKLALEEFNKHRDIDKQCRFEEILANFAAIPMIFDEIAQNKDNLAQISIKYQNQGKKDLLQASAEDDVKAIKDLLDQTNNLLHKLKIFHISQSEDKANILDKDEHFYLVFEECYFELANIVPLYNKIRNYITQKPYSDEKFKLNFENSTLANGWDKNKEPDNTAILFIKDDKYYLGVMNKKNNKIFDDKAIKENKGEGYKKIVYKLLPGANKMLPKVFFSAKSIKFYNPSEDILRIRNHSTHTKNGSPQKGYEKFEFNIEDCRKFIDFYKQSISKHPEWKDFGFRFSDTQRYNSIDEFYREVENQGYKLTFENISESYIDSVVNQGKLYLFQIYNKDFSAYSKGRPNLHTLYWKALFDERNLQDVVYKLNGEAELFYRKQSIPKKITHPAKEAIANKNKDNPKKESVFEYDLIKDKRFTEDKFFFHCPITINFKSSGANKFNDEINLLLKEKANDVHILSIARGERHLAYYTLVDGKGNIIKQDTFNIIGNDRMKTNYHDKLAAIEKDRDSARKDWKKINNIKEMKEGYLSQVVHEIAKLVIEYNAIVVFADLNFGFKRGRFKVEKQVYQKLEKMLIEKLNYLVFKDNEFDKTGGVLRAYQLTAPFETFKKMGKQTGIIYYVPAGFTSKICPVTGFVNQLYPKYESVSKSQEFFSKFDKICYNLDKGYFEFSFDYKNFGDKAAKGKWTIASFGSRLINFRNSDKNHNWDTREVYPTKELEKLLKDYSIEYGHGECIKAAICGESDKKFFAKLTSVLNTILQMRNSKTGTELDYLISPVADVNGNFFDSRQAPKNMPQDAAANGAYHIGLKGLMLLGRIKNNQEGKKLNLVIKNEEYFEFVQNRNN

SEQ ID NO: 91 - protein, 1052 aa, Staphylococcus aureus
KRNYILGLDIGITSVGYGIIDYETRDVIDAGVRLFKEANVENNEGRRSKRGARRLKRRRRHRIQRVKKLLFDYNLLTDHSELSGINPYEARVKGLSQKLSEEEFSAALLHLAKRRGVHNVNEVEEDTGNELSTKEQISRNSKALEEKYVAELQLERLKKDGEVRGSINRFKTSDYVKEAKQLLKVQKAYHQLDQSFIDTYIDLLETRRTYYEGPGEGSPFGWKDIKEWYEMLMGHCTYFPEELRSVKYAYNADLYNALNDLNNLVITRDENEKLEYYEKFQIIENVFKQKKKPTLKQIAKEILVNEEDIKGYRVTSTGKPEFTNLKVYHDIKDITARKEIIENAELLDQIAKILTIYQSSEDIQEELTNLNSELTQEEIEQISNLKGYTGTHNLSLKAINLILDELWHTNDNQIAIFNRLKLVPKKVDLSQQKEIPTTLVDDFILSPVVKRSFIQSIKVINAIIKKYGLPNDIIIELAREKNSKDAQKMINEMQKRNRQTNERIEEIIRTTGKENAKYLIEKIKLHDMQEGKCLYSLEAIPLEDLLNNPFNYEVDHIIPRSVSFDNSFNNKVLVKQEENSKKGNRTPFQYLSSSDSKISYETFKKHILNLAKGKGRISKTKKEYLLEERDINRFSVQKDFINRNLVDTRYATRGLMNLLRSYFRVNNLDVKVKSINGGFTSFLRRKWKFKKERNKGYKHHAEDALIIANADFIFKEWKKLDKAKKVMENQMFEEKQAESMPEIETEQEYKEIFITPHQIKHIKDFKDYKYSHRVDKKPNRELINDTLYSTRKDDKGNTLIVNNLNGLYDKDNDKLKKLINKSPEKLLMYHHDPQTYQKLKLIMEQYGDEKNPLYKYYEETGNYLTKYSKKDNGPVIKKIKYYGNKLNAHLDITDDYPNSRNKVVKLSLKPYRFDVYLDNGVYKFVTVKNLDVIKKENYYEVNSKCYEEAKKLKKISNQAEFIASFYNNDLIKINGELYRVIGVNNDLLNRIEVNMIDITYREYLENMNDKRPPRIIKTIASKTQSIKKYSTDILGNLYEVKSKKHPQIIKKG

SEQ ID NO: 92 - protein, 1052 aa, Staphylococcus aureus
KRNYILGLDIGITSVGYGIIDYETRDVIDAGVRLFKEANVENNEGRRSKRGARRLKRRRRHRIQRVKKLLFDYNLLTDHSELSGINPYEARVKGLSQKLSEEEFSAALLHLAKRRGVHNVNEVEEDTGNELSTKEQISRNSKALEEKYVAELQLERLKKDGEVRGSINRFKTSDYVKEAKQLLKVQKAYHQLDQSFIDTYIDLLETRRTYYEGPGEGSPFGWKDIKEWYEMLMGHCTYFPEELRSVKYAYNADLYNALNDLNNLVITRDENEKLEYYEKFQIIENVFKQKKKPTLKQIAKEILVNEEDIKGYRVTSTGKPEFTNLKVYHDIKDITARKEIIENAELLDQIAKILTIYQSSEDIQEELTNLNSELTQEEIEQISNLKGYTGTHNLSLKAINLILDELWHTNDNQIAIFNRLKLVPKKVDLSQQKEIPTTLVDDFILSPVVKRSFIQSIKVINAIIKKYGLPNDIIIELAREKNSKDAQKMINEMQKRNRQTNERIEEIIRTTGKENAKYLIEKIKLHDMQEGKCLYSLEAIPLEDLLNNPFNYEVDHIIPRSVSFDNSFNNKVLVKQEEASKKGNRTPFQYLSSSDSKISYETFKKHILNLAKGKGRISKTKKEYLLEERDINRFSVQKDFINRNLVDTRYATRGLMNLLRSYFRVNNLDVKVKSINGGFTSFLRRKWKFKKERNKGYKHHAEDALIIANADFIFKEWKKLDKAKKVMENQMFEEKQAESMPEIETEQEYKEIFITPHQIKHIKDFKDYKYSHRVDKKPNRELINDTLYSTRKDDKGNTLIVNNLNGLYDKDNDKLKKLINKSPEKLLMYHHDPQTYQKLKLIMEQYGDEKNPLYKYYEETGNYLTKYSKKDNGPVIKKIKYYGNKLNAHLDITDDYPNSRNKVVKLSLKPYRFDVYLDNGVYKFVTVKNLDVIKKENYYEVNSKCYEEAKKLKKISNQAEFIASFYNNDLIKINGELYRVIGVNNDLLNRIEVNMIDITYREYLENMNDKRPPRIIKTIASKTQSIKKYSTDILGNLYEVKSKKHPQIIKKG

SEQ ID NO: 93 - protein, 1052 aa, Staphylococcus aureus
KRNYILGLDIGITSVGYGIIDYETRDVIDAGVRLFKEANVENNEGRRSKRGARRLKRRRRHRIQRVKKLLFDYNLLTDHSELSGINPYEARVKGLSQKLSEEEFSAALLHLAKRRGVHNVNEVEEDTGNELSTKEQISRNSKALEEKYVAELQLERLKKDGEVRGSINRFKTSDYVKEAKQLLKVQKAYHQLDQSFIDTYIDLLETRRTYYEGPGEGSPFGWKDIKEWYEMLMGHCTYFPEELRSVKYAYNADLYNALNDLNNLVITRDENEKLEYYEKFQIIENVFKQKKKPTLKQIAKEILVNEEDIKGYRVTSTGKPEFTNLKVYHDIKDITARKEIIENAELLDQIAKILTIYQSSEDIQEELTNLNSELTQEEIEQISNLKGYTGTHNLSLKAINLILDELWHTNDNQIAIFNRLKLVPKKVDLSQQKEIPTTLVDDFILSPVVKRSFIQSIKVINAIIKKYGLPNDIIIELAREKNSKDAQKMINEMQKRNRQTNERIEEIIRTTGKENAKYLIEKIKLHDMQEGKCLYSLEAIPLEDLLNNPFNYEVDHIIPRSVSFDNSFNNKVLVKQEEASKKGNRTPFQYLSSSDSKISYETFKKHILNLAKGKGRISKTKKEYLLEERDINRFSVQKDFINRNLVDTRYATRGLMNLLRSYFRVNNLDVKVKSINGGFTSFLRRKWKFKKERNKGYKHHAEDALIIANADFIFKEWKKLDKAKKVMENQMFEEKQAESMPEIETEQEYKEIFITPHQIKHIKDFKDYKYSHRVDKKPNRKLINDTLYSTRKDDKGNTLIVNNLNGLYDKDNDKLKKLINKSPEKLLMYHHDPQTYQKLKLIMEQYGDEKNPLYKYYEETGNYLTKYSKKDNGPVIKKIKYYGNKLNAHLDITDDYPNSRNKVVKLSLKPYRFDVYLDNGVYKFVTVKNLDVIKKENYYEVNSKCYEEAKKLKKISNQAEFIASFYKNDLIKINGELYRVIGVNNDLLNRIEVNMIDITYREYLENMNDKRPPHIIKTIASKTQSIKKYSTDILGNLYEVKSKKHPQIIKKG

SEQ ID NO: 94 - protein, 167 aa, Escherichia coli; identical to SEQ ID NO: 1

SEQ ID NO: 95 - DNA, 47 bp, Artificial Sequence
  Description of Artificial Sequence: Synthetic oligonucleotide
gggaaataagagagaaaagaagagtaagaagaaatataagagccacc

SEQ ID NO: 96 - DNA, 101 bp, Artificial Sequence
  Description of Artificial Sequence: Synthetic polynucleotide
gctggagcctcggtggccatgcttcttgccccttgggcctccccccagcccctcctccccttcctgcacccgtacccccgtggtctttgaataaagtctga

SEQ ID NO: 97 - DNA, 3420 bp, Artificial Sequence
  Description of Artificial Sequence: Synthetic polynucleotide
atggccccaaagaagaagcggaaggtcggtatccacggagtcccagcagccgccaccagatccttcatcctgaagatcgagcccaacgaggaagtgaagaaaggcctctggaaaacccacgaggtgctgaaccacggaatcgcctactacatgaatatcctgaagctgatccggcaagaggccatctacgagcaccacgagcaggaccccaagaatcccaagaaggtgtccaaggccgagatccaggccgagctgtgggatttcgtgctgaagatgcagaagtgcaacagcttcacacacgaggtggacaaggacgaggtgttcaacatcctgagagagctgtacgaggaactggtgcccagcagcgtggaaaagaagggcgaagccaaccagctgagcaacaagtttctgtaccctctggtggaccccaacagccagtctggaaagggaacagccagcagcggcagaaagcccagatggtacaacctgaagattgccggcgatccctcctgggaagaagagaagaagaagtgggaagaagataagaaaaaggacccgctggccaagatcctgggcaagctggctgagtacggactgatccctctgttcatcccctacaccgacagcaacgagcccatcgtgaaagaaatcaagtggatggaaaagtcccggaaccagagcgtgcggcggctggataaggacatgttcattcaggccctggaacggttcctgagctgggagagctggaacctgaaagtgaaagaggaatacgagaaggtcgagaaagagtacaagaccctggaagagaggatcaaagaggacatccaggctctgaaggctctggaacagtatgagaaagagcggcaagaacagctgctgcgggacaccctgaacaccaacgagtaccggctgagcaagagaggccttagaggctggcgggaaatcatccagaaatggctgaaaatggacgagaacgagccctccgagaagtacctggaagtgttcaaggactaccagcggaagcaccctagagaggccggcgattacagcgtgtacgagttcctgtccaagaaagagaaccacttcatctggcggaatcaccctgagtacccctacctgtacgccaccttctgcgagatcgacaagaaaaagaaggacgccaagcagcaggccaccttcacactggccgatcctatcaatcaccctctgtgggtccgattcgaggaaagaagcggcagcaacctgaacaagtacagaatcctgaccgagcagctgcacaccgagaagctgaagaaaaagctgacagtgcagctggaccggctgatctaccctacagaatctggcggctgggaagagaagggcaaagtggacattgtgctgctgcccagccggcagttctacaaccagatcttcctggacatcgaggaaaagggcaagcacgccttcacctacaaggatgagagcatcaagttccctctgaagggcacactcggcggagccagagtgcagttcgacagagatcacctgagaagataccctcacaaggtggaaagcggcaacgtgggcagaatctacttcaacatgaccgtgaacatcgagcctacagagtccccagtgtccaagtctctgaagatccaccgggacgacttccccaaggtggtcaacttcaagcccaaagaactgaccgagtggatcaaggacagcaagggcaagaaactgaagtccggcatcgagtccctggaaatcggcctgagagtgatgagcatcgacctgggacagagacaggccgctgccgcctctattttcgaggtggtggatcagaagcccgacatcgaaggcaagctgtttttcccaatcaagggcaccgagctgtatgccgtgcacagagccagcttcaacatcaagctgcccggcgagacactggtcaagagcagagaagtgctgcggaaggccagagaggacaatctgaaactgatgaaccagaagctcaacttcctgcggaacgtgctgcacttccagcagttcgaggacatcaccgagagagagaagcgggtcaccaagtggatcagcagacaagagaacagcgacgtgcccctggtgtaccaggatgagctgatccagatccgcgagctgatgtacaagccttacaaggactgggtcgccttcctgaagcagctccacaagagactggaagtcgagatcggcaaagaagtgaagcactggcggaagtccctgagcgacggaagaaagggcctgtacggcatctccctgaagaacatcgacgagatcgatcggacccggaagttcctgctgagatggtccctgaggcctaccgaacctggcgaagtgcgtagactggaacccggccagagattcgccatcgaccagctgaatcacctgaacgccctgaaagaagatcggctgaagaagatggccaacaccatcatcatgcacgccctgggctactgctacgacgtgcggaagaagaaatggcaggctaagaaccccgcctgccagatcatcctgttcgaggatctgagcaactacaacccctacgaggaaaggtcccgcttcgagaacagcaagctcatgaagtggtccagacgcgagatccccagacaggttgcactgcagggcgagatctatggcctgcaagtgggagaagtgggcgctcagttcagcagcagattccacgccaagacaggcagccctggcatcagatgtagcgtcgtgaccaaagagaagctgcaggacaatcggttcttcaagaatctgcagagagagggcagactgaccctggacaaaatcgccgtgctgaaagagggcgatctgtacccagacaaaggcggcgagaagttcatcagcctgagcaaggatcggaagtgcgtgaccacacacgccgacatcaacgccgctcagaacctgcagaagcggttctggacaagaacccacggcttctacaaggtgtactgcaaggcctaccaggtggacggccagaccgtgtacatccctgagagcaaggaccagaagcagaagatcatcgaagagttcggcgagggctacttcattctgaaggacggggtgtacgaatgggtcaacgccggcaagctgaaaatcaagaagggcagctccaagcagagcagcagcgagctggtggatagcgacatcctgaaagacagcttcgacctggcctccgagctgaaaggcgaaaagctgatgctgtacagggaccccagcggcaatgtgttccccagcgacaaatggatggccgctggcgtgttcttcggaaagctggaacgcatcctgatcagcaagctgaccaaccagtactccatcagcaccatcgaggacgacagcagcaagcagtctatgaaaaggccggcggccacgaaaaaggccggccaggcaaaaaagaaaaag

SEQ ID NO: 98 - protein, 1108 aa, Bacillus thermoamylovorans
MATRSFILKIEPNEEVKKGLWKTHEVLNHGIAYYMNILKLIRQEAIYEHHEQDPKNPKKVSKAEIQAELWDFVLKMQKCNSFTHEVDKDVVFNILRELYEELVPSSVEKKGEANQLSNKFLYPLVDPNSQSGKGTASSGRKPRWYNLKIAGDPSWEEEKKKWEEDKKKDPLAKILGKLAEYGLIPLFIPFTDSNEPIVKEIKWMEKSRNQSVRRLDKDMFIQALERFLSWESWNLKVKEEYEKVEKEHKTLEERIKEDIQAFKSLEQYEKERQEQLLRDTLNTNEYRLSKRGLRGWREIIQKWLKMDENEPSEKYLEVFKDYQRKHPREAGDYSVYEFLSKKENHFIWRNHPEYPYLYATFCEIDKKKKDAKQQATFTLADPINHPLWVRFEERSGSNLNKYRILTEQLHTEKLKKKLTVQLDRLIYPTESGGWEEKGKVDIVLLPSRQFYNQIFLDIEEKGKHAFTYKDESIKFPLKGTLGGARVQFDRDHLRRYPHKVESGNVGRIYFNMTVNIEPTESPVSKSLKIHRDDFPKFVNFKPKELTEWIKDSKGKKLKSGIESLEIGLRVMSIDLGQRQAAAASIFEVVDQKPDIEGKLFFPIKGTELYAVHRASFNIKLPGETLVKSREVLRKAREDNLKLMNQKLNFLRNVLHFQQFEDITEREKRVTKWISRQENSDVPLVYQDELIQIRELMYKPYKDWVAFLKQLHKRLEVEIGKEVKHWRKSLSDGRKGLYGISLKNIDEIDRTRKFLLRWSLRPTEPGEVRRLEPGQRFAIDQLNHLNALKEDRLKKMANTIIMHALGYCYDVRKKKWQAKNPACQIILFEDLSNYNPYEERSRFENSKLMKWSRREIPRQVALQGEIYGLQVGEVGAQFSSRFHAKTGSPGIRCSVVTKEKLQDNRFFKNLQREGRLTLDKIAVLKEGDLYPDKGGEKFISLSKDRKLVTTHADINAAQNLQKRFWTRTHGFYKVYCKAYQVDGQTVYIPESKDQKQKIIEEFGEGYFILKDGVYEWGNAGKLKIKKGSSKQSSSELVDSDILKDSFDLASELKGEKLMLYRDPSGNVFPSDKWMAAGVFFGKLERILISKLTNQYSISTIEDDSSKQSM

SEQ ID NO: 99 - protein, 1302 aa, Unknown
  Description of Unknown: Cas12c1 sequence
MQTKKTHLHLISAKASRKYRRTIACLSDTAKKDLERRKQSGAADPAQELSCLKTIKFKLEVPEGSKLPSFDRISQIYNALETIEKGSLSYLLFALILSGFRIFPNSSAAKTFASSSCYKNDQFASQIKEIFGEMVKNFIPSELESILKKGRRKNNKDWTEENIKRVLNSEFGRKNSEGSSALFDSFLSKFSQELFRKFDSWNEVNKKYLEAAELLDSMLASYGPFDSVCKMIGDSDSRNSLPDKSTIAFTNNAEITVDIESSVMPYMAIAALLREYRQSKSKAAPVAYVQSHLTTTNGNGLSWFFKFGLDLIRKAPVSSKQSTSDGSKSLQELFSVPDDKLDGLKFIKEACEALPEASLLCGEKGELLGYQDFRTSFAGHIDSWVANYVNRLFELIELVNQLPESIKLPSILTQKNHNLVASLGLQEAEVSHSLELFEGLVKNVRQTLKKLAGIDISSSPNEQDIKEFYAFSDVLNRLGSIRNQIENAVQTAKKDKIDLESAIEWKEWKKLKKLPKLNGLGGGVPKQQELLDKALESVKQIRHYQRIDFERVIQWAVNEHCLETVPKFLVDAEKKKINKESSTDFAAKENAVRFLLEGIGAAARGKTDSVSKAAYNWFVVNNFLAKKDLNRYFINCQGCIYKPPYSKRRSLAFALRSDNKDTIEVVWEKFETFYKEISKEIEKFNIFSQEFQTFLHLENLRMKLLLRRIQKPIPAEIAFFSLPQEYYDSLPPNVAFLALNQEITPSEYITQFNLYSSFLNGNLILLRRSRSYLRAKFSWVGNSKLIYAAKEARLWKIPNAYWKSDEWKMILDSNVLVFDKAGNVLPAPTLKKVCEREGDLRLFYPLLRQLPHDWCYRNPFVKSVGREKNVIEVNKEGEPKVASALPGSLFRLIGPAPFKSLLDDCFFNPLDKDLRECMLIVDQEISQKVEAQKVEASLESCTYSIAVPIRYHLEEPKVSNQFENVLAIDQGEAGLAYAVFSLKSIGEAETKPIAVGTIRIPSIRRLIHSVSTYRKKKQRLQNFKQNYDSTAFIMRENVTGDVCAKIVGLMKEFNAFPVLEYDVKNLESGSRQLSAVYKAVNSHFLYFKEPGRDALRKQLWYGGDSWTIDGIEIVTRERKEDGKEGVEKIVPLKVFPGRSVSARFTSKTCSCCGRNVFDWLFTEKKAKTNKKFNVNSKGELTTADGVIQLFEADRSKGPKFYARRKERTPLTKPIAKGSYSLEEIERRVRTNLRRAPKSKQSRDTSQSQYFCVYKDCALHFSGMQADENAAINIGRRFLTALRKNRRSDFPSNVKISDRLLDN

SEQ ID NO: 100 - protein, 1218 aa, Unknown
  Description of Unknown: Cas12c2 sequence
MTKHSIPLHAFRNSGADARKWKGRIALLAKRGKETMRTLQFPLEMSEPEAAAINTTPFAVAYNAIEGTGKGTLFDYWAKLHLAGFRFFPSGGAATIFRQQAVFEDASWNAAFCQQSGKDWPWLVPSKLYERFTKAPREVAKKDGSKKSIEFTQENVANESHVSLVGASITDKTPEDQKEFFLKMAGALAEKFDSWKSANEDRIVAMKVIDEFLKSEGLHLPSLENIAVKCSVETKPDNATVAWHDAPMSGVQNLAIGVFATCASRIDNIYDLNGGKLSKLIQESATTPNVTALSWLFGKGLEYFRTTDIDTIMQDFNIPASAKESIKPLVESAQAIPTMTVLGKKNYAPFRPNFGGKIDSWIANYASRLMLLNDILEQIEPGFELPQALLDNETLMSGIDMTGDELKELIEAVYAWVDAAKQGLATLLGRGGNVDDAVQTFEQFSAMMDTLNGTLNTISARYVRAVEMAGKDEARLEKLIECKFDIPKWCKSVPKLVGISGGLPKVEEEIKVMNAAFKDVRARMFVRFEEIAAYVASKGAGMDVYDALEKRELEQIKKLKSAVPERAHIQAYRAVLHRIGRAVQNCSEKTKQLFSSKVIEMGVFKNPSHLNNFIFNQKGAIYRSPFDRSRHAPYQLHADKLLKNDWLELLAEISATLMASESTEQMEDALRLERTRLQLQLSGLPDWEYPASLAKPDIEVEIQTALKMQLAKDTVTSDVLQRAFNLYSSVLSGLTFKLLRRSFSLKMRFSVADTTQLIYVPKVCDWAIPKQYLQAEGEIGIAARVVTESSPAKMVTEVEMKEPKALGHFMQQAPHDWYFDASLGGTQVAGRIVEKGKEVGKERKLVGYRMRGNSAYKTVLDKSLVGNTELSQCSMIIEIPYTQTVDADFRAQVQAGLPKVSINLPVKETITASNKDEQMLFDRFVAIDLGERGLGYAVFDAKTLELQESGHRPIKAITNLLNRTHHYEQRPNQRQKFQAKFNVNLSELRENTVGDVCHQINRICAYYNAFPVLEYMVPDRLDKQLKSVYESVTNRYIWSSTDAHKSARVQFWLGGETWEHPYLKSAKDKKPLVLSPGRGASGKGTSQTCSCCGRNPFDLIKDMKPRAKIAVVDGKAKLENSELKLFERNLESKDDMLARRHRNERAGMEQPLTPGNYTVDEIKALLRANLRRAPKNRRTKDTTVSEYHCVFSDCGKTMHADENAAVNIGGKFIADIEK

SEQ ID NO: 101 - protein, 1252 aa, Unknown
  Description of Unknown: OspCas12c sequence
MTKLRHRQKKLTHDWAGSKKREVLGSNGKLQNPLLMPVKKGQVTEFRKAFSAYARATKGEMTDGRKNMFTHSFEPFKTKPSLHQCELADKAYQSLHSYLPGSLAHFLLSAHALGFRIFSKSGEATAFQASSKIEAYESKLASELACVDLSIQNLTISTLFNALTTSVRGKGEETSADPLIARFYTLLTGKPLSRDTQGPERDLAEVISRKIASSFGTWKEMTANPLQSLQFFEEELHALDANVSLSPAFDVLIKMNDLQGDLKNRTIVFDPDAPVFEYNAEDPADIIIKLTARYAKEAVIKNQNVGNYVKNAITTTNANGLGWLLNKGLSLLPVSTDDELLEFIGVERSHPSCHALIELIAQLEAPELFEKNVFSDTRSEVQGMIDSAVSNHIARLSSSRNSLSMDSEELERLIKSFQIHTPHCSLFIGAQSLSQQLESLPEALQSGVNSADILLGSTQYMLTNSLVEESIATYQRTLNRINYLSGVAGQINGAIKRKAIDGEKIHLPAAWSELISLPFIGQPVIDVESDLAHLKNQYQTLSNEFDTLISALQKNFDLNFNKALLNRTQHFEAMCRSTKKNALSKPEIVSYRDLLARLTSCLYRGSLVLRRAGIEVLKKHKIFESNSELREHVHERKHFVFVSPLDRKAKKLLRLTDSRPDLLHVIDEILQHDNLENKDRESLWLVRSGYLLAGLPDQLSSSFINLPIITQKGDRRLIDLIQYDQINRDAFVMLVTSAFKSNLSGLQYRANKQSFVVTRTLSPYLGSKLVYVPKDKDWLVPSQMFEGRFADILQSDYMVWKDAGRLCVIDTAKHLSNIKKSVFSSEEVLAFLRELPHRTFIQTEVRGLGVNVDGIAFNNGDIPSLKTFSNCVQVKVSRTNTSLVQTLNRWFEGGKVSPPSIQFERAYYKKDDQIHEDAAKRKIRFQMPATELVHASDDAGWTPSYLLGIDPGEYGMGLSLVSINNGEVLDSGFIHINSLINFASKKSNHQTKVVPRQQYKSPYANYLEQSKDSAAGDIAHILDRLIYKLNALPVFEALSGNSQSAADQVWTKVLSFYTWGDNDAQNSIRKQHWFGASHWDIKGMLRQPPTEKKPKPYIAFPGSQVSSYGNSQRCSCCGRNPIEQLREMAKDTSIKELKIRNSEIQLFDGTIKLFNPDPSTVIERRRHNLGPSRIPVADRTFKNISPSSLEFKELITIVSRSIRHSPEFIAKKRGIGSEYFCAYSDCNSSLNSEANAAANVAQKFQKQLFFEL

SEQ ID NO: 102 - protein, 767 aa, Unknown
  Description of Unknown: Cas12g1 sequence
MAQASSTPAVSPRPRPRYREERTLVRKLLPRPGQSKQEFRENVKKLRKAFLQFNADVSGVCQWAIQFRPRYGKPAEPTETFWKFFLEPETSLPPNDSRSPEFRRLQAFEAAAGINGAAALDDPAFTNELRDSILAVASRPKTKEAQRLFSRLKDYQPAHRMILAKVAAEWIESRYRRAHQNWERNYEEWKKEKQEWEQNHPELTPEIREAFNQIFQQLEVKEKRVRICPAARLLQNKDNCQYAGKNKHSVLCNQFNEFKKNHLQGKAIKFFYKDAEKYLRCGLQSLKPNVQGPFREDWNKYLRYMNLKEETLRGKNGGRLPHCKNLGQECEFNPHTALCKQYQQQLSSRPDLVQHDELYRKWRREYWREPRKPVFRYPSVKRHSIAKIFGENYFQADFKNSVVGLRLDSMPAGQYLEFAFAPWPRNYRPQPGETEISSVHLHFVGTRPRIGFRFRVPHKRSRFDCTQEELDELRSRTFPRKAQDQKFLEAARKRLLETFPGNAEQELRLLAVDLGTDSARAAFFIGKTFQQAFPLKIVKIEKLYEQWPNQKQAGDRRDASSKQPRPGLSRDHVGRHLQKMRAQASEIAQKRQELTGTPAPETTTDQAAKKATLQPFDLRGLTVHTARMIRDWARLNARQIIQLAEENQVDLIVLESLRGFRPPGYENLDQEKKRRVAFFAHGRIRRKVTEKAVERGMRVVTVPYLASSKVCAECRKKQKDNKQWEKNKKRGLFKCEGCGSQAQVDENAARVLGRVFWGEIELPTAIP

SEQ ID NO: 103 - protein, 870 aa, Unknown
  Description of Unknown: Cas12h1 sequence
MKVHEIPRSQLLKIKQYEGSFVEWYRDLQEDRKKFASLLFRWAAFGYAAREDDGATYISPSQALLERRLLLGDAEDVAIKFLDVLFKGGAPSSSCYSLFYEDFALRDKAKYSGAKREFIEGLATMPLDKIIERIRQDEQLSKIPAEEWLILGAEYSPEEIWEQVAPRIVNVDRSLGKQLRERLGIKCRRPHDAGYCKILMEVVARQLRSHNETYHEYLNQTHEMKTKVANNLTNEFDLVCEFAEVLEEKNYGLGWYVLWQGVKQALKEQKKPTKIQIAVDQLRQPKFAGLLTAKWRALKGAYDTWKLKKRLEKRKAFPYMPNWDNDYQIPVGLTGLGVFTLEVKRTEVVVDLKEHGKLFCSHSHYFGDLTAEKHPSRYHLKFRHKLKLRKRDSRVEPTIGPWIEAALREITIQKKPNGVFYLGLPYALSHGIDNFQIAKRFFSAAKPDKEVINGLPSEMVVGAADLNLSNIVAPVKARIGKGLEGPLHALDYGYGELIDGPKILTPDGPRCGELISLKRDIVEIKSAIKEFKACQREGLTMSEETTTWLSEVESPSDSPRCMIQSRIADTSRRLNSFKYQMNKEGYQDLAEALRLLDAMDSYNSLLESYQRMHLSPGEQSPKEAKFDTKRASFRDLLRRRVAHTIVEYFDDCDIVFFEDLDGPSDSDSRNNALVKLLSPRTLLLYIRQALEKRGIGMVEVAKDGTSQNNPISGHVGWRNKQNKSEIYFYEDKELLVMDADEVGAMNILCRGLNHSVCPYSFVTKAPEKKNDEKKEGDYGKRVKRFLKDRYGSSNVRFLVASMGFVTVTTKRPKDALVGKRLYYHGGELVTHDLHNRMKDEIKYLVEKEVLARRVSLSDSTIKSYKSFAHV

SEQ ID NO: 104 - protein, 1093 aa, Unknown
  Description of Unknown: Cas12i1 sequence
MSNKEKNASETRKAYTTKMIPRSHDRMKLLGNFMDYLMDGTPIFFELWNQFGGGIDRDIISGTANKDKISDDLLLAVNWFKVMPINSKPQGVSPSNLANLFQQYSGSEPDIQAQEYFASNFDTEKHQWKDMRVEYERLLAELQLSRSDMHHDLKLMYKEKCIGLSLSTAHYITSVMFGTGAKNNRQTKHQFYSKVIQLLEESTQINSVEQLASIILKAGDCDSYRKLRIRCSRKGATPSILKIVQDYELGTNHDDEVNVPSLIANLKEKLGRFEYECEWKCMEKIKAFLASKVGPYYLGSYSAMLENALSPIKGMTTKNCKFVLKQIDAKNDIKYENEPFGKIVEGFFDSPYFESDTNVKWVLHPHHIGESNIKTLWEDLNAIHSKYEEDIASLSEDKKEKRIKVYQGDVCQTINTYCEEVGKEAKTPLVQLLRYLYSRKDDIAVDKIIDGITFLSKKHKVEKQKINPVIQKYPSFNFGNNSKLLGKIISPKDKLKHNLKCNRNQVDNYIWIEIKVLNTKTMRWEKHHYALSSTRFLEEVYYPATSENPPDALAARFRTKTNGYEGKPALSAEQIEQIRSAPVGLRKVKKRQMRLEAARQQNLLPRYTWGKDFNINICKRGNNFEVTLATKVKKKKEKNYKVVLGYDANIVRKNTYAAIEAHANGDGVIDYNDLPVKPIESGFVTVESQVRDKSYDQLSYNGVKLLYCKPHVESRRSFLEKYRNGTMKDNRGNNIQIDFMKDFEAIADDETSLYYFNMKYCKLLQSSIRNHSSQAKEYREEIFELLRDGKLSVLKLSSLSNLSFVMFKVAKSLIGTYFGHLLKKPKNSKSDVKAPPITDEDKQKADPEMFALRLALEEKRLNKVKSKKEVIANKIVAKALELRDKYGPVLIKGENISDTTKKGKKSSTNSFLMDWLARGVANKVKEMVMMHQGLEFVEVNPNFTSHQDPFVHKNPENTFRARYSRCTPSELTEKNRKEILSFLSDKPSKRPTNAYYNEGAMAFLATYGLKKNDVLGVSLEKFKQIMANILHQRSEDQLLFPSRGGMFYLATYKLDADATSVNWNGKQFWVCNADLVAAYNVGLVDIQKDFKKK

SEQ ID NO: 105 - protein, 1054 aa, Unknown
  Description of Unknown: Cas12i2 sequence
MSSAIKSYKSVLRPNERKNQLLKSTIQCLEDGSAFFFKMLQGLFGGITPEIVRFSTEQEKQQQDIALWCAVNWFRPVSQDSLTHTIASDNLVEKFEEYYGGTASDAIKQYFSASIGESYYWNDCRQQYYDLCRELGVEVSDLTHDLEILCREKCLAVATESNQNNSIISVLFGTGEKEDRSVKLRITKKILEAISNLKEIPKNVAPIQEIILNVAKATKETFRQVYAGNLGAPSTLEKFIAKDGQKEFDLKKLQTDLKKVIRGKSKERDWCCQEELRSYVEQNTIQYDLWAWGEMFNKAHTALKIKSTRNYNFAKQRLEQFKEIQSLNNLLVVKKLNDFFDSEFFSGEETYTICVHHLGGKDLSKLYKAWEDDPADPENAIVVLCDDLKNNFKKEPIRNILRYIFTIRQECSAQDILAAAKYNQQLDRYKSQKANPSVLGNQGFTWTNAVILPEKAQRNDRPNSLDLRIWLYLKLRHPDGRWKKHHIPFYDTRFFQEIYAAGNSPVDTCQFRTPRFGYHLPKLTDQTAIRVNKKHVKAAKTEARIRLAIQQGTLPVSNLKITEISATINSKGQVRIPVKFDVGRQKGTLQIGDRFCGYDQNQTASHAYSLWEVVKEGQYHKELGCFVRFISSGDIVSITENRGNQFDQLSYEGLAYPQYADWRKKASKFVSLWQITKKNKKKEIVTVEAKEKFDAICKYQPRLYKFNKEYAYLLRDIVRGKSLVELQQIRQEIFRFIEQDCGVTRLGSLSLSTLETVKAVKGIIYSYFSTALNASKNNPISDEQRKEFDPELFALLEKLELIRTRKKKQKVERIANSLIQTCLENNIKFIRGEGDLSTTNNATKKKANSRSMDWLARGVFNKIRQLAPMHNITLFGCGSLYTSHQDPLVHRNPDKAMKCRWAAIPVKDIGDWVLRKLSQNLRAKNIGTGEYYHQGVKEFLSHYELQDLEEELLKWRSDRKSNIPCWVLQNRLAEKLGNKEAVVYIPVRGGRIYFATHKVATGAVSIVFDQKQVWVCNADHVAAANIALTVKGIGEQSSDEENPDGSRIKLQLTS

SEQ ID NO: 106 - protein, 6 aa, Artificial Sequence
  Description of Artificial Sequence: Synthetic peptide
GGSGGS

SEQ ID NO: 107 - DNA, 4092 bp, Artificial Sequence
  Description of Artificial Sequence: Synthetic polynucleotide
gccaccatggccccaaagaagaagcggaaggtcggtatccacggagtcccagcagccgccaccagatccttcatcctgaagatcgagcccaacgaggaagtgaagaaaggcctctggaaaacccacgaggtgctgaaccacggaatcgcctactacatgaatatcctgaagctgatccggcaagaggccatctacgagcaccacgagcaggaccccaagaatcccaagaaggtgtccaaggccgagatccaggccgagctgtgggatttcgtgctgaagatgcagaagtgcaacagcttcacacacgaggtggacaaggacgaggtgttcaacatcctgagagagctgtacgaggaactggtgcccagcagcgtggaaaagaagggcgaagccaaccagctgagcaacaagtttctgtaccctctggtggaccccaacagccagtctggaaagggaacagccagcagcggcagaaagcccagatggtacaacctgaagattgccggcgatcccggaggctctggaggaagctccgaagtcgagttttcccatgagtactggatgagacacgcattgactctcgcaaagagggctcgagatgaacgcgaggtgcccgtgggggcagtactcgtgctcaacaatcgcgtaatcggcgaaggttggaatagggcaatcggactccacgaccccactgcacatgcggaaatcatggcccttcgacagggagggcttgtgatgcagaattatcgactttatgatgcgacgctgtacgtcacgtttgaaccttgcgtaatgtgcgcgggagctatgattcactcccgcattggacgagttgtattcggtgttcgcaacgccaagacgggtgccgcaggttcactgatggacgtgctgcatcatccaggcatgaaccaccgggtagaaatcacagaaggcatattggcggacgaatgtgcggcgctgttgtgtcgtttttttcgcatgcccaggcgggtctttaacgcccagaaaaaagcacaatcctctactgacggctcttctggatctgaaacacctggcacaagcgagagcgccacccctgagagctctggctcctgggaagaagagaagaagaagtgggaagaagataagaaaaaggacccgctggccaagatcctgggcaagctggctgagtacggactgatccctctgttcatcccctacaccgacagcaacgagcccatcgtgaaagaaatcaagtggatggaaaagtcccggaaccagagcgtgcggcggctggataaggacatgttcattcaggccctggaacggttcctgagctgggagagctggaacctgaaagtgaaagaggaatacgagaaggtcgagaaagagtacaagaccctggaagagaggatcaaagaggacatccaggctctgaaggctctggaacagtatgagaaagagcggcaagaacagctgctgcgggacaccctgaacaccaacgagtaccggctgagcaagagaggccttagaggctggcgggaaatcatccagaaatggctgaaaatggacgagaacgagccctccgagaagtacctggaagtgttcaaggactaccagcggaagcaccctagagaggccggcgattacagcgtgtacgagttcctgtccaagaaagagaaccacttcatctggcggaatcaccctgagtacccctacctgtacgccaccttctgcgagatcgacaagaaaaagaaggacgccaagcagcaggccaccttcacactggccgatcctatcaatcaccctctgtgggtccgattcgaggaaagaagcggcagcaacctgaacaagtacagaatcctgaccgagcagctgcacaccgagaagctgaagaaaaagctgacagtgcagctggaccggctgatctaccctacagaatctggcggctgggaagagaagggcaaagtggacattgtgctgctgcccagccggcagttctacaaccagatcttcctggacatcgaggaaaagggcaagcacgccttcacctacaaggatgagagcatcaagttccctctgaagggcacactcggcggagccagagtgcagttcgacagagatcacctgagaagataccctcacaaggtggaaagcggcaacgtgggcagaatctacttcaacatgaccgtgaacatcgagcctacagagtccccagtgtccaagtctctgaagatccaccgggacgacttccccaaggtggtcaacttcaagcccaaagaactgaccgagtggatcaaggacagcaagggcaagaaactgaagtccggcatcgagtccctggaaatcggcctgagagtgatgagcatcgacctgggacagagacaggccgctgccgcctctattttcgaggtggtggatcagaagcccgacatcgaaggcaagctgtttttcccaatcaagggcaccgagctgtatgccgtgcacagagccagcttcaacatcaagctgcccggcgagacactggtcaagagcagagaagtgctgcggaaggccagagaggacaatctgaaactgatgaaccagaagctcaacttcctgcggaacgtgctgcacttccagcagttcgaggacatcaccgagagagagaagcgggtcaccaagtggatcagcagacaagagaacagcgacgtgcccctggtgtaccaggatgagctgatccagatccgcgagctgatgtacaagccttacaaggactgggtcgccttcctgaagcagctccacaagagactggaagtcgagatcggcaaagaagtgaagcactggcggaagtccctgagcgacggaagaaagggcctgtacggcatctccctgaagaacatcgacgagatcgatcggacccggaagttcctgctgagatggtccctgaggcctaccgaacctggcgaagtgcgtagactggaacccggccagagattcgccatcgaccagctgaatcacctgaacgccctgaaagaagatcggctgaagaagatggccaacaccatcatcatgcacgccctgggctactgctacgacgtgcggaagaagaaatggcaggctaagaaccccgcctgccagatcatcctgttcgaggatctgagcaactacaacccctacgaggaaaggtcccgcttcgagaacagcaagctcatgaagtggtccagacgcgagatccccagacaggttgcactgcagggcgagatctatggcctgcaagtgggagaagtgggcgctcagttcagcagcagattccacgccaagacaggcagccctggcatcagatgtagcgtcgtgaccaaagagaagctgcaggacaatcggttcttcaagaatctgcagagagagggcagactgaccctggacaaaatcgccgtgctgaaagagggcgatctgtacccagacaaaggcggcgagaagttcatcagcctgagcaaggatcggaagtgcgtgaccacacacgccgacatcaacgccgctcagaacctgcagaagcggttctggacaagaacccacggcttctacaaggtgtactgcaaggcctaccaggtggacggccagaccgtgtacatccctgagagcaaggaccagaagcagaagatcatcgaagagttcggcgagggctacttcattctgaaggacggggtgtacgaatgggtcaacgccggcaagctgaaaatcaagaagggcagctccaagcagagcagcagcgagctggtggatagcgacatcctgaaagacagcttcgacctggcctccgagctgaaaggcgaaaagctgatgctgtacagggaccccagcggcaatgtgttccccagcgacaaatggatggccgctggcgtgttcttcggaaagctggaacgcatcctgatcagcaagctgaccaaccagtactccatcagcaccatcgaggacgacagcagcaagcagtctatgaaaaggccggcggccacgaaaaaggccggccaggcaaaaaagaaaaagggatcctacccatacgatgttccagattacgcttatccctacgacgtgcctgattatgcatacccatatgatgtccccgactatgcctaa

SEQ ID NO: 108 - protein, 1361 aa, Artificial Sequence
  Description of Artificial Sequence: Synthetic polypeptide
MAPKKKRKVGIHGVPAAATRSFILKIEPNEEVKKGLWKTHEVLNHGIAYYMNILKLIRQEAIYEHHEQDPKNPKKVSKAEIQAELWDFVLKMQKCNSFTHEVDKDEVFNILRELYEELVPSSVEKKGEANQLSNKFLYPLVDPNSQSGKGTASSGRKPRWYNLKIAGDPGGSGGSSEVEFSHEYWMRHALTLAKRARDEREVPVGAVLVLNNRVIGEGWNRAIGLHDPTAHAEIMALRQGGLVMQNYRLYDATLYVTFEPCVMCAGAMIHSRIGRVVFGVRNAKTGAAGSLMDVLHHPGMNHRVEITEGILADECAALLCRFFRMPRRVFNAQKKAQSSTDGSSGSETPGTSESATPESSGSWEEEKKKWEEDKKKDPLAKILGKLAEYGLIPLFIPYTDSNEPIVKEIKWMEKSRNQSVRRLDKDMFIQALERFLSWESWNLKVKEEYEKVEKEYKTLEERIKEDIQALKALEQYEKERQEQLLRDTLNTNEYRLSKRGLRGWREIIQKWLKMDENEPSEKYLEVFKDYQRKHPREAGDYSVYEFLSKKENHFIWRNHPEYPYLYATFCEIDKKKKDAKQQATFTLADPINHPLWVRFEERSGSNLNKYRILTEQLHTEKLKKKLTVQLDRLIYPTESGGWEEKGKVDIVLLPSRQFYNQIFLDIEEKGKHAFTYKDESIKFPLKGTLGGARVQFDRDHLRRYPHKVESGNVGRIYFNMTVNIEPTESPVSKSLKIHRDDFPKVVNFKPKELTEWIKDSKGKKLKSGIESLEIGLRVMSIDLGQRQAAAASIFEVVDQKPDIEGKLFFPIKGTELYAVHRASFNIKLPGETLVKSREVLRKAREDNLKLMNQKLNFLRNVLHFQQFEDITEREKRVTKWISRQENSDVPLVYQDELIQIRELMYKPYKDWVAFLKQLHKRLEVEIGKEVKHWRKSLSDGRKGLYGISLKNIDEIDRTRKFLLRWSLRPTEPGEVRRLEPGQRFAIDQLNHLNALKEDRLKKMANTIIMHALGYCYDVRKKKWQAKNPACQIILFEDLSNYNPYEERSRFENSKLMKWSRREIPRQVALQGEIYGLQVGEVGAQFSSRFHAKTGSPGIRCSVVTKEKLQDNRFFKNLQREGRLTLDKIAVLKEGDLYPDKGGEKFISLSKDRKCVTTHADINAAQNLQKRFWTRTHGFYKVYCKAYQVDGQTVYIPESKDQKQKIIEEFGEGYFILKDGVYEWVNAGKLKIKKGSSKQSSSELVDSDILKDSFDLASELKGEKLMLYRDPSGNVFPSDKWMAAGVFFGKLERILISKLTNQYSISTIEDDSSKQSMKRPAATKKAGQAKKKKGSYPYDVPDYAYPYDVPDYAYPYDVPDYA

SEQ ID NO: 109 - DNA, 4092 bp, Artificial Sequence
  Description of Artificial Sequence: Synthetic polynucleotide
gccaccatggccccaaagaagaagcggaaggtcggtatccacggagtcccagcagccgccaccagatccttcatcctgaagatcgagcccaacgaggaagtgaagaaaggcctctggaaaacccacgaggtgctgaaccacggaatcgcctactacatgaatatcctgaagctgatccggcaagaggccatctacgagcaccacgagcaggaccccaagaatcccaagaaggtgtccaaggccgagatccaggccgagctgtgggatttcgtgctgaagatgcagaagtgcaacagcttcacacacgaggtggacaaggacgaggtgttcaacatcctgagagagctgtacgaggaactggtgcccagcagcgtggaaaagaagggcgaagccaaccagctgagcaacaagtttctgtaccctctggtggaccccaacagccagtctggaaagggaacagccagcagcggcagaaagcccagatggtacaacctgaagattgccggcgatccctcctgggaagaagagaagaagaagtgggaagaagataagaaaaaggacccgctggccaagatcctgggcaagctggctgagtacggactgatccctctgttcatcccctacaccgacagcaacgagcccatcgtgaaagaaatcaagtggatggaaaagtcccggaaccagagcgtgcggcggctggataaggacatgttcattcaggccctggaacggttcctgagctgggagagctggaacctgaaagtgaaagaggaatacgagaaggtcgagaaagagtacaagaccctggaagagaggatcaaaggaggctctggaggaagctccgaagtcgagttttcccatgagtactggatgagacacgcattgactctcgcaaagagggctcgagatgaacgcgaggtgcccgtgggggcagtactcgtgctcaacaatcgcgtaatcggcgaaggttggaatagggcaatcggactccacgaccccactgcacatgcggaaatcatggcccttcgacagggagggcttgtgatgcagaattatcgactttatgatgcgacgctgtacgtcacgtttgaaccttgcgtaatgtgcgcgggagctatgattcactcccgcattggacgagttgtattcggtgttcgcaacgccaagacgggtgccgcaggttcactgatggacgtgctgcatcatccaggcatgaaccaccgggtagaaatcacagaaggcatattggcggacgaatgtgcggcgctgttgtgtcgtttttttcgcatgcccaggcgggtctttaacgcccagaaaaaagcacaatcctctactgacggctcttctggatctgaaacacctggcacaagcgagagcgccacccctgagagctctggcgaggacatccaggctctgaaggctctggaacagtatgagaaagagcggcaagaacagctgctgcgggacaccctgaacaccaacgagtaccggctgagcaagagaggccttagaggctggcgggaaatcatccagaaatggctgaaaatggacgagaacgagccctccgagaagtacctggaagtgttcaaggactaccagcggaagcaccctagagaggccggcgattacagcgtgtacgagttcctgtccaagaaagagaaccacttcatctggcggaatcaccctgagtacccctacctgtacgccaccttctgcgagatcgacaagaaaaagaaggacgccaagcagcaggccaccttcacactggccgatcctatcaatcaccctctgtgggtccgattcgaggaaagaagcggcagcaacctgaacaagtacagaatcctgaccgagcagctgcacaccgagaagctgaagaaaaagctgacagtgcagctggaccggctgatctaccctacagaatctggcggctgggaagagaagggcaaagtggacattgtgctgctgcccagccggcagttctacaaccagatcttcctggacatcgaggaaaagggcaagcacgccttcacctacaaggatgagagcatcaagttccctctgaagggcacactcggcggagccagagtgcagttcgacagagatcacctgagaagataccctcacaaggtggaaagcggcaacgtgggcagaatctacttcaacatgaccgtgaacatcgagcctacagagtccccagtgtccaagtctctgaagatccaccgggacgacttccccaaggtggtcaacttcaagcccaaagaactgaccgagtggatcaaggacagcaagggcaagaaactgaagtccggcatcgagtccctggaaatcggcctgagagtgatgagcatcgacctgggacagagacaggccgctgccgcctctattttcgaggtggtggatcagaagcccgacatcgaaggcaagctgtttttcccaatcaagggcaccgagctgtatgccgtgcacagagccagcttcaacatcaagctgcccggcgagacactggtcaagagcagagaagtgctgcggaaggccagagaggacaatctgaaactgatgaaccagaagctcaacttcctgcggaacgtgctgcacttccagcagttcgaggacatcaccgagagagagaagcgggtcaccaagtggatcagcagacaagagaacagcgacgtgcccctggtgtaccaggatgagctgatccagatccgcgagctgatgtacaagccttacaaggactgggtcgccttcctgaagcagctccacaagagactggaagtcgagatcggcaaagaagtgaagcactggcggaagtccctgagcgacggaagaaagggcctgtacggcatctccctgaagaacatcgacgagatcgatcggacccggaagttcctgctgagatggtccctgaggcctaccgaacctggcgaagtgcgtagactggaacccggccagagattcgccatcgaccagctgaatcacctgaacgccctgaaagaagatcggctgaagaagatggccaacaccatcatcatgcacgccctgggctactgctacgacgtgcggaagaagaaatggcaggctaagaaccccgcctgccagatcatcctgttcgaggatctgagcaactacaacccctacgaggaaaggtcccgcttcgagaacagcaagctcatgaagtggtccagacgcgagatccccagacaggttgcactgcagggcgagatctatggcctgcaagtgggagaagtgggcgctcagttcagcagcagattccacgccaagacaggcagccctggcatcagatgtagcgtcgtgaccaaagagaagctgcaggacaatcggttcttcaagaatctgcagagagagggcagactgaccctggacaaaatcgccgtgctgaaagagggcgatctgtacccagacaaaggcggcgagaagttcatcagcctgagcaaggatcggaagtgcgtgaccacacacgccgacatcaacgccgctcagaacctgcagaagcggttctggacaagaacccacggcttctacaaggtgtactgcaaggcctaccaggtggacggccagaccgtgtacatccctgagagcaaggaccagaagcagaagatcatcgaagagttcggcgagggctacttcattctgaaggacggggtgtacgaatgggtcaacgccggcaagctgaaaatcaagaagggcagctccaagcagagcagcagcgagctggtggatagcgacatcctgaaagacagcttcgacctggcctccgagctgaaaggcgaaaagctgatgctgtacagggaccccagcggcaatgtgttccccagcgacaaatggatggccgctggcgtgttcttcggaaagctggaacgcatcctgatcagcaagctgaccaaccagtactccatcagcaccatcgaggacgacagcagcaagcagtctatgaaaaggccggcggccacgaaaaaggccggccaggcaaaaaagaaaaagggatcctacccatacgatgttccagattacgcttatccctacgacgtgcctgattatgcatacccatatgatgtccccgactatgcctaa

SEQ ID NO: 110 - protein, 1361 aa, Artificial Sequence
  Description of Artificial Sequence: Synthetic polypeptide
MAPKKKRKVGIHGVPAAATRSFILKIEPNEEVKKGLWKTHEVLNHGIAYYMNILKLIRQEAIYEHHEQDPKNPKKVSKAEIQAELWDFVLKMQKCNSFTHEVDKDEVFNILRELYEELVPSSVEKKGEANQLSNKFLYPLVDPNSQSGKGTASSGRKPRWYNLKIAGDPSWEEEKKKWEEDKKKDPLAKILGKLAEYGLIPLFIPYTDSNEPIVKEIKWMEKSRNQSVRRLDKDMFIQALERFLSWESWNLKVKEEYEKVEKEYKTLEERIKGGSGGSSEVEFSHEYWMRHALTLAKRARDEREVPVGAVLVLNNRVIGEGWNRAIGLHDPTAHAEIMALRQGGLVMQNYRLYDATLYVTFEPCVMCAGAMIHSRIGRVVFGVRNAKTGAAGSLMDVLHHPGMNHRVEITEGILADECAALLCRFFRMPRRVFNAQKKAQSSTDGSSGSETPGTSESATPESSGEDIQALKALEQYEKERQEQLLRDTLNTNEYRLSKRGLRGWREIIQKWLKMDENEPSEKYLEVFKDYQRKHPREAGDYSVYEFLSKKENHFIWRNHPEYPYLYATFCEIDKKKKDAKQQATFTLADPINHPLWVRFEERSGSNLNKYRILTEQLHTEKLKKKLTVQLDRLIYPTESGGWEEKGKVDIVLLPSRQFYNQIFLDIEEKGKHAFTYKDESIKFPLKGTLGGARVQFDRDHLRRYPHKVESGNVGRIYFNMTVNIEPTESPVSKSLKIHRDDFPKVVNFKPKELTEWIKDSKGKKLKSGIESLEIGLRVMSIDLGQRQAAAASIFEVVDQKPDIEGKLFFPIKGTELYAVHRASFNIKLPGETLVKSREVLRKAREDNLKLMNQKLNFLRNVLHFQQFEDITEREKRVTKWISRQENSDVPLVYQDELIQIRELMYKPYKDWVAFLKQLHKRLEVEIGKEVKHWRKSLSDGRKGLYGISLKNIDEIDRTRKFLLRWSLRPTEPGEVRRLEPGQRFAIDQLNHLNALKEDRLKKMANTIIMHALGYCYDVRKKKWQAKNPACQIILFEDLSNYNPYEERSRFENSKLMKWSRREIPRQVALQGEIYGLQVGEVGAQFSSRFHAKTGSPGIRCSVVTKEKLQDNRFFKNLQREGRLTLDKIAVLKEGDLYPDKGGEKFISLSKDRKCVTTHADINAAQNLQKRFWTRTHGFYKVYCKAYQVDGQTVYIPESKDQKQKIIEEFGEGYFILKDGVYEWVNAGKLKIKKGSSKQSSSELVDSDILKDSFDLASELKGEKLMLYRDPSGNVFPSDKWMAAGVFFGKLERILISKLTNQYSISTIEDDSSKQSMKRPAATKKAGQAKKKKGSYPYDVPDYAYPYDVPDYAYPYDVPDYA

SEQ ID NO: 111 - DNA, 4092 bp, Artificial Sequence
  Description of Artificial Sequence: Synthetic polynucleotide
gccaccatggccccaaagaagaagcggaaggtcggtatccacggagtcccagcagccgccaccagatccttcatcctgaagatcgagcccaacgaggaagtgaagaaaggcctctggaaaacccacgaggtgctgaaccacggaatcgcctactacatgaatatcctgaagctgatccggcaagaggccatctacgagcaccacgagcaggaccccaagaatcccaagaaggtgtccaaggccgagatccaggccgagctgtgggatttcgtgctgaagatgcagaagtgcaacagcttcacacacgaggtggacaaggacgaggtgttcaacatcctgagagagctgtacgaggaactggtgcccagcagcgtggaaaagaagggcgaagccaaccagctgagcaacaagtttctgtaccctctggtggaccccaacagccagtctggaaagggaacagccagcagcggcagaaagcccagatggtacaacctgaagattgccggcgatccctcctgggaagaagagaagaagaagtgggaagaagataagaaaaaggacccgctggccaagatcctgggcaagctggctgagtacggactgatccctctgttcatcccctacaccgacagcaacgagcccatcgtgaaagaaatcaagtggatggaaaagtcccggaaccagagcgtgcggcggctggataaggacatgttcattcaggccctggaacggttcctgagctgggagagctggaacctgaaagtgaaagaggaatacgagaaggtcgagaaagagtacaagaccctggaagagaggatcaaagaggacatccaggctctgaaggctctggaacagtatgagaaagagcggcaagaacagctgctgcgggacaccctgaacaccaacgagtaccggctgagcaagagaggccttagaggctggcgggaaatcatccagaaatggctgaaaatggacggaggctctggaggaagctccgaagtcgagttttcccatgagtactggatgagacacgcattgactctcgcaaagagggctcgagatgaacgcgaggtgcccgtgggggcagtactcgtgctcaacaatcgcgtaatcggcgaaggttggaatagggcaatcggactccacgaccccactgcacatgcggaaatcatggcccttcgacagggagggcttgtgatgcagaattatcgactttatgatgcgacgctgtacgtcacgtttgaaccttgcgtaatgtgcgcgggagctatgattcactcccgcattggacgagttgtattcggtgttcgcaacgccaagacgggtgccgcaggttcactgatggacgtgctgcatcatccaggcatgaaccaccgggtagaaatcacagaaggcatattggcggacgaatgtgcggcgctgttgtgtcgtttttttcgcatgcccaggcgggtctttaacgcccagaaaaaagcacaatcctctactgacggctcttctggatctgaaacacctggcacaagcgagagcgccacccctgagagctctggcgagaacgagccctccgagaagtacctggaagtgttcaaggactaccagcggaagcaccctagagaggccggcgattacagcgtgtacgagttcctgtccaagaaagagaaccacttcatctggcggaatcaccctgagtacccctacctgtacgccaccttctgcgagatcgacaagaaaaagaaggacgccaagcagcaggccaccttcacactggccgatcctatcaatcaccctctgtgggtccgattcgaggaaagaagcggcagcaacctgaacaagtacagaatcctgaccgagcagctgcacaccgagaagctgaagaaaaagctgacagtgcagctggaccggctgatctaccctacagaatctggcggctgggaagagaagggcaaagtggacattgtgctgctgcccagccggcagttctacaaccagatcttcctggacatcgaggaaaagggcaagcacgccttcacctacaaggatgagagcatcaagttccctctgaagggcacactcggcggagccagagtgcagttcgacagagatcacctgagaagataccctcacaaggtggaaagcggcaacgtgggcagaatctacttcaacatgaccgtgaacatcgagcctacagagtccccagtgtccaagtctctgaagatccaccgggacgacttccccaaggtggtcaacttcaagcccaaagaactgaccgagtggatcaaggacagcaagggcaagaaactgaagtccggcatcgagtccctggaaatcggcctgagagtgatgagcatcgacctgggacagagacaggccgctgccgcctctattttcgaggtggtggatcagaagcccgacatcgaaggcaagctgtttttcccaatcaagggcaccgagctgtatgccgtgcacagagccagcttcaacatcaagctgcccggcgagacactggtcaagagcagagaagtgctgcggaaggccagagaggacaatctgaaactgatgaaccagaagctcaacttcctgcggaacgtgctgcacttccagcagttcgaggacatcaccgagagagagaagcgggtcaccaagtggatcagcagacaagagaacagcgacgtgcccctggtgtaccaggatgagctgatccagatccgcgagctgatgtacaagccttacaaggactgggtcgccttcctgaagcagctccacaagagactggaagtcgagatcggcaaagaagtgaagcactggcggaagtccctgagcgacggaagaaagggcctgtacggcatctccctgaagaacatcgacgagatcgatcggacccggaagttcctgctgagatggtccctgaggcctaccgaacctggcgaagtgcgtagactggaacccggccagagattcgccatcgaccagctgaatcacctgaacgccctgaaagaagatcggctgaagaagatggccaacaccatcatcatgcacgccctgggctactgctacgacgtgcggaagaagaaatggcaggctaagaaccccgcctgccagatcatcctgttcgaggatctgagcaactacaacccctacgaggaaaggtcccgcttcgagaacagcaagctcatgaagtggtccagacgcgagatccccagacaggttgcactgcagggcgagatctatggcctgcaagtgggagaagtgggcgctcagttcagcagcagattccacgccaagacaggcagccctggcatcagatgtagcgtcgtgaccaaagagaagctgcaggacaatcggttcttcaagaatctgcagagagagggcagactgaccctggacaaaatcgccgtgctgaaagagggcgatctgtacccagacaaaggcggcgagaagttcatcagcctgagcaaggatcggaagtgcgtgaccacacacgccgacatcaacgccgctcagaacctgcagaagcggttctggacaagaacccacggcttctacaaggtgtactgcaaggcctaccaggtggacggccagaccgtgtacatccctgagagcaaggaccagaagcagaagatcatcgaagagttcggcgagggctacttcattctgaaggacggggtgtacgaatgggtcaacgccggcaagctgaaaatcaagaagggcagctccaagcagagcagcagcgagctggtggatagcgacatcctgaaagacagcttcgacctggcctccgagctgaaaggcgaaaagctgatgctgtacagggaccccagcggcaatgtgttccccagcgacaaatggatggccgctggcgtgttcttcggaaagctggaacgcatcctgatcagcaagctgaccaaccagtactccatcagcaccatcgaggacgacagcagcaagcagtctatgaaaaggccggcggccacgaaaaaggccggccaggcaaaaaagaaaaagggatcctacccatacgatgttccagattacgcttatccctacgacgtgcctgattatgcatacccatatgatgtccccgactatgcctaa

SEQ ID NO: 112 - protein, 1361 aa, Artificial Sequence
  Description of Artificial Sequence: Synthetic polypeptide
MAPKKKRKVGIHGVPAAATRSFILKIEPNEEVKKGLWKTHEVLNHGIAYYMNILKLIRQEAIYEHHEQDPKNPKKVSKAEIQAELWDFVLKMQKCNSFTHEVDKDEVFNILRELYEELVPSSVEKKGEANQLSNKFLYPLVDPNSQSGKGTASSGRKPRWYNLKIAGDPSWEEEKKKWEEDKKKDPLAKILGKLAEYGLIPLFIPYTDSNEPIVKEIKWMEKSRNQSVRRLDKDMFIQALERFLSWESWNLKVKEEYEKVEKEYKTLEERIKEDIQALKALEQYEKERQEQLLRDTLNTNEYRLSKRGLRGWREIIQKWLKMDGGSGGSSEVEFSHEYWMRHALTLAKRARDEREVPVGAVLVLNNRVIGEGWNRAIGLHDPTAHAEIMALRQGGLVMQNYRLYDATLYVTFEPCVMCAGAMIHSRIGRVVFGVRNAKTGAAGSLMDVLHHPGMNHRVEITEGILADECAALLCRFFRMPRRVFNAQKKAQSSTDGSSGSETPGTSESATPESSGENEPSEKYLEVFKDYQRKHPREAGDYSVYEFLSKKENHFIWRNHPEYPYLYATFCEIDKKKKDAKQQATFTLADPINHPLWVRFEERSGSNLNKYRILTEQLHTEKLKKKLTVQLDRLIYPTESGGWEEKGKVDIVLLPSRQFYNQIFLDIEEKGKHAFTYKDESIKFPLKGTLGGARVQFDRDHLRRYPHKVESGNVGRIYFNMTVNIEPTESPVSKSLKIHRDDFPKVVNFKPKELTEWIKDSKGKKLKSGIESLEIGLRVMSIDLGQRQAAAASIFEVVDQKPDIEGKLFFPIKGTELYAVHRASFNIKLPGETLVKSREVLRKAREDNLKLMNQKLNFLRNVLHFQQFEDITEREKRVTKWISRQENSDVPLVYQDELIQIRELMYKPYKDWVAFLKQLHKRLEVEIGKEVKHWRKSLSDGRKGLYGISLKNIDEIDRTRKFLLRWSLRPTEPGEVRRLEPGQRFAIDQLNHLNALKEDRLKKMANTIIMHALGYCYDVRKKKWQAKNPACQIILFEDLSNYNPYEERSRFENSKLMKWSRREIPRQVALQGEIYGLQVGEVGAQFSSRFHAKTGSPGIRCSVVTKEKLQDNRFFKNLQREGRLTLDKIAVLKEGDLYPDKGGEKFISLSKDRKCVTTHADINAAQNLQKRFWTRTHGFYKVYCKAYQVDGQTVYIPESKDQKQKIIEEFGEGYFILKDGVYEWVNAGKLKIKKGSSKQSSSELVDSDILKDSFDLASELKGEKLMLYRDPSGNVFPSDKWMAAGVFFGKLERILISKLTNQYSISTIEDDSSKQSMKRPAATKKAGQAKKKKGSYPYDVPDYAYPYDVPDYAYPYDVPDYA

SEQ ID NO: 113 - DNA, 4092 bp, Artificial Sequence
  Description of Artificial Sequence: Synthetic polynucleotide
gccaccatggccccaaagaagaagcggaaggtcggtatccacggagtcccagcagccgccaccagatccttcatcctgaagatcgagcccaacgaggaagtgaagaaaggcctctggaaaacccacgaggtgctgaaccacggaatcgcctactacatgaatatcctgaagctgatccggcaagaggccatctacgagcaccacgagcaggaccccaagaatcccaagaaggtgtccaaggccgagatccaggccgagctgtgggatttcgtgctgaagatgcagaagtgcaacagcttcacacacgaggtggacaaggacgaggtgttcaacatcctgagagagctgtacgaggaactggtgcccagcagcgtggaaaagaagggcgaagccaaccagctgagcaacaagtttctgtaccctctggtggaccccaacagccagtctggaaagggaacagccagcagcggcagaaagcccagatggtacaacctgaagattgccggcgatccctcctgggaagaagagaagaagaagtgggaagaagataagaaaaaggacccgctggccaagatcctgggcaagctggctgagtacggactgatccctctgttcatcccctacaccgacagcaacgagcccatcgtgaaagaaatcaagtggatggaaaagtcccggaaccagagcgtgcggcggctggataaggacatgttcattcaggccctggaacggttcctgagctgggagagctggaacctgaaagtgaaagaggaatacgagaaggtcgagaaagagtacaagaccctggaagagaggatcaaagaggacatccaggctctgaaggctctggaacagtatgagaaagagcggcaagaacagctgctgcgggacaccctgaacaccaacgagtaccggctgagcaagagaggccttagaggctggcgggaaatcatccagaaatggctgaaaatggacgagaacgagccctccgagaagtacctggaagtgttcaaggactaccagcggaagcaccctagagaggccggcgattacagcgtgtacgagttcctgtccaagaaagagaaccacttcatctggcggaatcaccctgagtacccctacctgtacgccaccttctgcgagatcgacaagaaaaagaaggacgccaagcagcaggccaccttcacactggccgatcctatcaatcaccctctgtgggtccgattcgaggaaagaagcggcagcaacctgaacaagtacagaatcctgaccgagcagctgcacaccgagaagctgaagaaaaagctgacagtgcagctggaccggctgatctaccctacagaatctggcggctgggaagagaagggcaaagtggacattgtgctgctgcccagccggcagttctacaaccagatcttcctggacatcgaggaaaagggcaagcacgccttcacctacaaggatgagagcatcaagttccctctgaagggcacactcggcggagccagagtgcagttcgacagagatcacctgagaagataccctcacaaggtggaaagcggcaacgtgggcagaatctacttcaacatgaccgtgaacatcgagcctacagagtccccagtgtccaagtctctgaagatccaccgggacgacttccccaaggtggtcaacttcaagcccaaagaactgaccgagtggatcaaggacagcaagggcaagaaactgaagtccggcatcgagtccctggaaatcggcctgagagtgatgagcatcgacctgggacagagacaggccgctgccgcctctattttcgaggtggtggatcagaagcccgacatcgaaggcaagctgtttttcccaatcaagggcaccgagctgtatgccgtgcacagagccagcttcaacatcaagctgcccggcgagacactggtcaagagcagagaagtgctgcggaaggccagagaggacaatctgaaactgatgaaccagaagctcaacttcctgcggaacgtgctgcacttccagcagttcgaggacatcaccgagagagagaagcgggtcaccaagtggatcagcagacaagagaacagcgacgtgcccctggtgtaccaggatgagctgatccagatccgcgagctgatgtacaagccttacaaggactgggtcgccttcctgaagcagctccacaagagactggaagtcgagatcggcaaagaagtgaagcactggcggaagtccctgagcgacggaagaaagggcctgtacggcatctccctgaagaacatcgacgagatcgatcggacccggaagttcctgctgagatggtccctgaggcctaccgaacctggcgaagtgcgtagactggaacccggccagagattcgccatcgaccagctgaatcacctgaacgccctgaaagaagatcggctgaagaagatggccaacaccatcatcatgcacgccctgggctactgctacgacgtgcggaagaagaaatggcaggctaagaaccccgcctgccagatcatcctgttcgaggatctgagcaactacaacccctacgaggaaaggtcccgcttcgagaacagcaagctcatgaagtggtccagacgcgagatccccagacaggttgcactgcagggcgagatctatggcctgcaagtgggagaagtgggcgctcagttcagcagcagattccacgccaagacaggcagccctggcatcagatgtagcgtcgtgaccaaagagaagctgcaggacaatcggttcttcaagaatctgcagagagagggcagactgaccctggacaaaatcgccgtgctgaaagagggcgatctgtacccagacaaaggcggcgagaagttcatcagcctgagcaaggatcggaagtgcgtgaccacacacgccgacatcaacgccgctcagaacctgcagaagcggttctggacaagaacccacggcttctacaaggtgtactgcaaggcctaccaggtggacggaggctctggaggaagctccgaagtcgagttttcccatgagtactggatgagacacgcattgactctcgcaaagagggctcgagatgaacgcgaggtgcccgtgggggcagtactcgtgctcaacaatcgcgtaatcggcgaaggttggaatagggcaatcggactccacgaccccactgcacatgcggaaatcatggcccttcgacagggagggcttgtgatgcagaattatcgactttatgatgcgacgctgtacgtcacgtttgaaccttgcgtaatgtgcgcgggagctatgattcactcccgcattggacgagttgtattcggtgttcgcaacgccaagacgggtgccgcaggttcactgatggacgtgctgcatcatccaggcatgaaccaccgggtagaaatcacagaaggcatattggcggacgaatgtgcggcgctgttgtgtcgtttttttcgcatgcccaggcgggtctttaacgcccagaaaaaagcacaatcctctactgacggctcttctggatctgaaacacctggcacaagcgagagcgccacccctgagagctctggcggccagaccgtgtacatccctgagagcaaggaccagaagcagaagatcatcgaagagttcggcgagggctacttcattctgaaggacggggtgtacgaatgggtcaacgccggcaagctgaaaatcaagaagggcagctccaagcagagcagcagcgagctggtggatagcgacatcctgaaagacagcttcgacctggcctccgagctgaaaggcgaaaagctgatgctgtacagggaccccagcggcaatgtgttccccagcgacaaatggatggccgctggcgtgttcttcggaaagctggaacgcatcctgatcagcaagctgaccaaccagtactccatcagcaccatcgaggacgacagcagcaagcagtctatgaaaaggccggcggccacgaaaaaggccggccaggcaaaaaagaaaaagggatcctacccatacgatgttccagattacgcttatccctacgacgtgcctgattatgcatacccatatgatgtccccgactatgcctaa

SEQ ID NO: 114 - protein, 1361 aa, Artificial Sequence
  Description of Artificial Sequence: Synthetic polypeptide
MAPKKKRKVGIHGVPAAATRSFILKIEPNEEVKKGLWKTHEVLNHGIAYYMNILKLIRQEAIYEHHEQDPKNPKKVSKAEIQAELWDFVLKMQKCNSFTHEVDKDEVFNILRELYEELVPSSVEKKGEANQLSNKFLYPLVDPNSQSGKGTASSGRKPRWYNLKIAGDPSWEEEKKKWEEDKKKDPLAKILGKLAEYGLIPLFIPYTDSNEPIVKEIKWMEKSRNQSVRRLDKDMFIQALERFLSWESWNLKVKEEYEKVEKEYKTLEERIKEDIQALKALEQYEKERQEQLLRDTLNTNEYRLSKRGLRGWREIIQKWLKMDENEPSEKYLEVFKDYQRKHPREAGDYSVYEFLSKKENHFIWRNHPEYPYLYATFCEIDKKKKDAKQQATFTLADPINHPLWVRFEERSGSNLNKYRILTEQLHTEKLKKKLTVQLDRLIYPTESGGWEEKGKVDIVLLPSRQFYNQIFLDIEEKGKHAFTYKDESIKFPLKGTLGGARVQFDRDHLRRYPHKVESGNVGRIYFNMTVNIEPTESPVSKSLKIHRDDFPKVVNFKPKELTEWIKDSKGKKLKSGIESLEIGLRVMSIDLGQRQAAAASIFEVVDQKPDIEGKLFFPIKGTELYAVHRASFNIKLPGETLVKSREVLRKAREDNLKLMNQKLNFLRNVLHFQQFEDITEREKRVTKWISRQENSDVPLVYQDELIQIRELMYKPYKDWVAFLKQLHKRLEVEIGKEVKHWRKSLSDGRKGLYGISLKNIDEIDRTRKFLLRWSLRPTEPGEVRRLEPGQRFAIDQLNHLNALKEDRLKKMANTIIMHALGYCYDVRKKKWQAKNPACQIILFEDLSNYNPYEERSRFENSKLMKWSRREIPRQVALQGEIYGLQVGEVGAQFSSRFHAKTGSPGIRCSVVTKEKLQDNRFFKNLQREGRLTLDKIAVLKEGDLYPDKGGEKFISLSKDRKCVTTHADINAAQNLQKRFWTRTHGFYKVYCKAYQVDGGSGGSSEVEFSHEYWMRHALTLAKRARDEREVPVGAVLVLNNRVIGEGWNRAIGLHDPTAHAEIMALRQGGLVMQNYRLYDATLYVTFEPCVMCAGAMIHSRIGRVVFGVRNAKTGAAGSLMDVLHHPGMNHRVEITEGILADECAALLCRFFRMPRRVFNAQKKAQSSTDGSSGSETPGTSESATPESSGGQTVYIPESKDQKQKIIEEFGEGYFILKDGVYEWVNAGKLKIKKGSSKQSSSELVDSDILKDSFDLASELKGEKLMLYRDPSGNVFPSDKWMAAGVFFGKLERILISKLTNQYSISTIEDDSSKQSMKRPAATKKAGQAKKKKGSYPYDVPDYAYPYDVPDYAYPYDVPDYA

SEQ ID NO: 115 - DNA, 4092 bp, Artificial Sequence
  Description of Artificial Sequence: Synthetic polynucleotide
gccaccatggccccaaagaagaagcggaaggtcggtatccacggagtcccagcagccgccaccagatccttcatcctgaagatcgagcccaacgaggaagtgaagaaaggcctctggaaaacccacgaggtgctgaaccacggaatcgcctactacatgaatatcctgaagctgatccggcaagaggccatctacgagcaccacgagcaggaccccaagaatcccaagaaggtgtccaaggccgagatccaggccgagctgtgggatttcgtgctgaagatgcagaagtgcaacagcttcacacacgaggtggacaaggacgaggtgttcaacatcctgagagagctgtacgaggaactggtgcccagcagcgtggaaaagaagggcgaagccaaccagctgagcaacaagtttctgtaccctctggtggaccccaacagccagtctggaaagggaacagccagcagcggcagaaagcccagatggtacaacctgaagattgccggcgatccctcctgggaagaagagaagaagaagtgggaagaagataagaaaaaggacccgctggccaagatcctgggcaagctggctgagtacggactgatccctctgttcatcccctacaccgacagcaacgagcccatcgtgaaagaaatcaagtggatggaaaagtcccggaaccagagcgtgcggcggctggataaggacatgttcattcaggccctggaacggttcctgagctgggagagctggaacctgaaagtgaaagaggaatacgagaaggtcgagaaagagtacaagaccctggaagagaggatcaaagaggacatccaggctctgaaggctctggaacagtatgagaaagagcggcaagaacagctgctgcgggacaccctgaacaccaacgagtaccggctgagcaagagaggccttagaggctggcgggaaatcatccagaaatggctgaaaatggacgagaacgagccctccgagaagtacctggaagtgttcaaggactaccagcggaagcaccctagagaggccggcgattacagcgtgtacgagttcctgtccaagaaagagaaccacttcatctggcggaatcaccctgagtacccctacctgtacgccaccttctgcgagatcgacaagaaaaagaaggacgccaagcagcaggccaccttcacactggccgatcctatcaatcaccctctgtgggtccgattcgaggaaagaagcggcagcaacctgaacaagtacagaatcctgaccgagcagctgcacaccgagaagctgaagaaaaagctgacagtgcagctggaccggctgatctaccctacagaatctggcggctgggaagagaagggcaaagtggacattgtgctgctgcccagccggcagttctacaaccagatcttcctggacatcgaggaaaagggcaagcacgccttcacctacaaggatgagagcatcaagttccctctgaagggcacactcggcggagccagagtgcagttcgacagagatcacctgagaagataccctcacaaggtggaaagcggcaacgtgggcagaatctacttcaacatgaccgtgaacatcgagcctacagagtccccagtgtccaagtctctgaagatccaccgggacgacttccccaaggtggtcaacttcaagcccaaagaactgaccgagtggatcaaggacagcaagggcaagaaactgaagtccggcatcgagtccctggaaatcggcctgagagtgatgagcatcgacctgggacagagacaggccgctgccgcctctattttcgaggtggtggatcagaagcccgacatcgaaggcaagctgtttttcccaatcaagggcaccgagctgtatgccgtgcacagagccagcttcaacatcaagctgcccggcgagacactggtcaagagcagagaagtgctgcggaaggccagagaggacaatctgaaactgatgaaccagaagctcaacttcctgcggaacgtgctgcacttccagcagttcgaggacatcaccgagagagagaagcgggtcaccaagtggatcagcagacaagagaacagcgacgtgcccctggtgtaccaggatgagctgatccagatccgcgagctgatgtacaagccttacaaggactgggtcgccttcctgaagcagctccacaagagactggaagtcgagatcggcaaagaagtgaagcactggcggaagtccctgagcgacggaagaaagggcctgtacggcatctccctgaagaacatcgacgagatcgatcggacccggaagttcctgctgagatggtccctgaggcctaccgaacctggcgaagtgcgtagactggaacccggccagagattcgccatcgaccagctgaatcacctgaacgccctgaaagaagatcggctgaagaagatggccaacaccatcatcatgcacgccctgggctactgctacgacgtgcggaagaagaaatggcaggctaagaaccccgcctgccagatcatcctgttcgaggatctgagcaactacaacccctacgaggaaaggtcccgcttcgagaacagcaagctcatgaagtggtccagacgcgagatccccagacaggttgcactgcagggcgagatctatggcctgcaagtgggagaagtgggcgctcagttcagcagcagattccacgccaagacaggcagccctggcatcagatgtagcgtcgtgaccaaagagaagctgcaggacaatcggttcttcaagaatctgcagagagagggcagactgaccctggacaaaatcgccgtgctgaaagagggcgatctgtacccagacaaaggcggcgagaagttcatcagcctgagcaaggatcggaagtgcgtgaccacacacgccgacatcaacgccgctcagaacctgcagaagcggttctggacaagaacccacggcttctacaaggtgtactgcaaggcctaccaggtggacggccagaccgtgtacatccctgagagcaaggaccagaagcagaagatcatcgaagagttcggcgagggctacttcattctgaaggacggggtgtacgaatgggtcaacgccggcaagggaggctctggaggaagctccgaagtcgagttttcccatgagtactggatgagacacgcattgactctcgcaaagagggctcgagatgaacgcgaggtgcccgtgggggcagtactcgtgctcaacaatcgcgtaatcggcgaaggttggaatagggcaatcggactccacgaccccactgcacatgcggaaatcatggcccttcgacagggagggcttgtgatgcagaattatcgactttatgatgcgacgctgtacgtcacgtttgaaccttgcgtaatgtgcgcgggagctatgattcactcccgcattggacgagttgtattcggtgttcgcaacgccaagacgggtgccgcaggttcactgatggacgtgctgcatcatccaggcatgaaccaccgggtagaaatcacagaaggcatattggcggacgaatgtgcggcgctgttgtgtcgtttttttcgcatgcccaggcgggtctttaacgcccagaaaaaagcacaatcctctactgacggctcttctggatctgaaacacctggcacaagcgagagcgccacccctgagagctctggcctgaaaatcaagaagggcagctccaagcagagcagcagcgagctggtggatagcgacatcctgaaagacagcttcgacctggcctccgagctgaaaggcgaaaagctgatgctgtacagggaccccagcggcaatgtgttccccagcgacaaatggatggccgctggcgtgttcttcggaaagctggaacgcatcctgatcagcaagctgaccaaccagtactccatcagcaccatcgaggacgacagcagcaagcagtctatgaaaaggccggcggccacgaaaaaggccggccaggcaaaaaagaaaaagggatcctacccatacgatgttccagattacgcttatccctacgacgtgcctgattatgcatacccatatgatgtccccgactatgcctaa

SEQ ID NO: 116 - protein, 1361 aa, Artificial Sequence
  Description of Artificial Sequence: Synthetic polypeptide
MAPKKKRKVGIHGVPAAATRSFILKIEPNEEVKKGLWKTHEVLNHGIAYYMNILKLIRQEAIYEHHEQDPKNPKKVSKAEIQAELWDFVLKMQKCNSFTHEVDKDEVFNILRELYEELVPSSVEKKGEANQLSNKFLYPLVDPNSQSGKGTASSGRKPRWYNLKIAGDPSWEEEKKKWEEDKKKDPLAKILGKLAEYGLIPLFIPYTDSNEPIVKEIKWMEKSRNQSVRRLDKDMFIQALERFLSWESWNLKVKEEYEKVEKEYKTLEERIKEDIQALKALEQYEKERQEQLLRDTLNTNEYRLSKRGLRGWREIIQKWLKMDENEPSEKYLEVFKDYQRKHPREAGDYSVYEFLSKKENHFIWRNHPEYPYLYATFCEIDKKKKDAKQQATFTLADPINHPLWVRFEERSGSNLNKYRILTEQLHTEKLKKKLTVQLDRLIYPTESGGWEEKGKVDIVLLPSRQFYNQIFLDIEEKGKHAFTYKDESIKFPLKGTLGGARVQFDRDHLRRYPHKVESGNVGRIYFNMTVNIEPTESPVSKSLKIHRDDFPKVVNFKPKELTEWIKDSKGKKLKSGIESLEIGLRVMSIDLGQRQAAAASIFEVVDQKPDIEGKLFFPIKGTELYAVHRASFNIKLPGETLVKSREVLRKAREDNLKLMNQKLNFLRNVLHFQQFEDITEREKRVTKWISRQENSDVPLVYQDELIQIRELMYKPYKDWVAFLKQLHKRLEVEIGKEVKHWRKSLSDGRKGLYGISLKNIDEIDRTRKFLLRWSLRPTEPGEVRRLEPGQRFAIDQLNHLNALKEDRLKKMANTIIMHALGYCYDVRKKKWQAKNPACQIILFEDLSNYNPYEERSRFENSKLMKWSRREIPRQVALQGEIYGLQVGEVGAQFSSRFHAKTGSPGIRCSVVTKEKLQDNRFFKNLQREGRLTLDKIAVLKEGDLYPDKGGEKFISLSKDRKCVTTHADINAAQNLQKRFWTRTHGFYKVYCKAYQVDGQTVYIPESKDQKQKIIEEFGEGYFILKDGVYEWVNAGKGGSGGSSEVEFSHEYWMRHALTLAKRARDEREVPVGAVLVLNNRVIGEGWNRAIGLHDPTAHAEIMALRQGGLVMQNYRLYDATLYVTFEPCVMCAGAMIHSRIGRVVFGVRNAKTGAAGSLMDVLHHPGMNHRVEITEGILADECAALLCRFFRMPRRVFNAQKKAQSSTDGSSGSETPGTSESATPESSGLKIKKGSSKQSSSELVDSDILKDSFDLASELKGEKLMLYRDPSGNVFPSDKWMAAGVFFGKLERILISKLTNQYSISTIEDDSSKQSMKRPAATKKAGQAKKKKGSYPYDVPDYAYPYDVPDYAYPYDVPDYA

SEQ ID NO: 117 - protein, 7 aa, Artificial Sequence
  Description of Artificial Sequence: Synthetic peptide
GGGSGGS

SEQ ID NO: 118 - protein, 707 aa, Unknown
  Description of Unknown: Cas-phi-1 sequence
MADTPTLFTQFLRHHLPGQRFRKDILKQAGRILANKGEDATIAFLRGKSEESPPDFQPPVKCPIIACSRPLTEWPIYQASVAIQGYVYGQSLAEFEASDPGCSKDGLLGWFDKTGVCTDYFSVQGLNLIFQNARKRYIGVQTKVTNRNEKRHKKLKRINAKRIAEGLPELTSDEPESALDETGHLIDPPGLNTNIYCYQQVSPKPLALSEVNQLPTAYAGYSTSGDDPIQPMVTKDRLSISKGQPGYIPEHQRALLSQKKHRRMRGYGLKARALLVIVRIQDDWAVIDLRSLLRNAYWRRIVQTKEPSTITKLLKLVTGDPVLDATRMVATFTYKPGIVQVRSAKCLKNKQGSKLFSERYLNETVSVTSIDLGSNNLVAVATYRLVNGNTPELLQRFTLPSHLVKDFERYKQAHDTLEDSIQKTAVASLPQGQQTEIRMWSMYGFREAQERVCQELGLADGSIPWNVMTATSTILTDLFLARGGDPKKCMFTSEPKKKKNSKQVLYKIRDRAWAKMYRTLLSKETREAWNKALWGLKRGSPDYARLSKRKEELARRCVNYTISTAEKRAQCGRTIVALEDLNIGFFHGRGKQEPGWVGLFTRKKENRWLMQALHKAFLELAHHRGYHVIEVNPAYTSQTCPVCRHCDPDNRDQHNREAFHCIGCGFRGNADLDVATHNIAMVAITGESLKRARGSVASKTPQPLAAE

SEQ ID NO: 119 - protein, 757 aa, Unknown
  Description of Unknown: Cas-phi-2 sequence
MPKPAVESEFSKVLKKHFPGERFRSSYMKRGGKILAAQGEEAVVAYLQGKSEEEPPNFQPPAKCHVVTKSRDFAEWPIMKASEAIQRYIYALSTTERAACKPGKSSESHAAWFAATGVSNHGYSHVQGLNLIFDHTLGRYDGVLKKVQLRNEKARARLESINASRADEGLPEIKAEEEEVATNETGHLLQPPGINPSFYVYQTISPQAYRPRDEIVLPPEYAGYVRDPNAPIPLGVVRNRCDIQKGCPGYIPEWQREAGTAISPKTGKAVTVPGLSPKKNKRMRRYWRSEKEKAQDALLVTVRIGTDWVVIDVRGLLRNARWRTIAPKDISLNALLDLFTGDPVIDVRRNIVTFTYTLDACGTYARKWTLKGKQTKATLDKLTATQTVALVAIDLGQTNPISAGISRVTQENGALQCEPLDRFTLPDDLLKDISAYRIAWDRNEEELRARSVEALPEAQQAEVRALDGVSKETARTQLCADFGLDPKRLPWDKMSSNTTFISEALLSNSVSRDQVFFTPAPKKGAKKKAPVEVMRKDRTWARAYKPRLSVEAQKLKNEALWALKRTSPEYLKLSRRKEELCRRSINYVIEKTRRRTQCQIVIPVIEDLNVRFFHGSGKRLPGWDNFFTAKKENRWFIQGLHKAFSDLRTHRSFYVFEVRPERTSITCPKCGHCEVGNRDGEAFQCLSCGKTCNADLDVATHNLTQVALTGKTMPKREEPRDAQGTAPARKTKKASKSKAPPAEREDQTPAQEPSQTS

SEQ ID NO: 120 - protein, 766 aa, Unknown
  Description of Unknown: Cas-phi-3 sequence
MEKEITELTKIRREFPNKKFSSTDMKKAGKLLKAEGPDAVRDFLNSCQEIIGDFKPPVKTNIVSISRPFEEWPVSMVGRAIQEYYFSLTKEELESVHPGTSSEDHKSFFNITGLSNYNYTSVQGLNLIFKNAKAIYDGTLVKANNKNKKLEKKFNEINHKRSLEGLPIITPDFEEPFDENGHLNNPPGINRNIYGYQGCAAKVFVPSKHKMVSLPKEYEGYNRDPNLSLAGFRNRLEIPEGEPGHVPWFQRMDIPEGQIGHVNKIQRFNFVHGKNSGKVKFSDKTGRVKRYHHSKYKDATKPYKFLEESKKVSALDSILAIITIGDDWVVFDIRGLYRNVFYRELAQKGLTAVQLLDLFTGDPVIDPKKGVVTFSYKEGVVPVFSQKIVPRFKSRDTLEKLTSQGPVALLSVDLGQNEPVAARVCSLKNINDKITLDNSCRISFLDDYKKQIKDYRDSLDELEIKIRLEAINSLETNQQVEIRDLDVFSADRAKANTVDMFDIDPNLISWDSMSDARVSTQISDLYLKNGGDESRVYFEINNKRIKRSDYNISQLVRPKLSDSTRKNLNDSIWKLKRTSEEYLKLSKRKLELSRAVVNYTIRQSKLLSGINDIVIILEDLDVKKKFNGRGIRDIGWDNFFSSRKENRWFIPAFHKAFSELSSNRGLCVIEVNPAWTSATCPDCGFCSKENRDGINFTCRKCGVSYHADIDVATLNIARVAVLGKPMSGPADRERLGDTKKPRVARSRKTMKRKDISNSTVEAMVTA

SEQ ID NO: 121 - protein, 765 aa, Unknown
  Description of Unknown: Cas-phi-4 sequence
MYSLEMADLKSEPSLLAKLLRDRFPGKYWLPKYWKLAEKKRLTGGEEAACEYMADKQLDSPPPNFRPPARCVILAKSRPFEDWPVHRVASKAQSFVIGLSEQGFAALRAAPPSTADARRDWLRSHGASEDDLMALEAQLLETIMGNAISLHGGVLKKIDNANVKAAKRLSGRNEARLNKGLQELPPEQEGSAYGADGLLVNPPGLNLNIYCRKSCCPKPVKNTARFVGHYPGYLRDSDSILISGTMDRLTIIEGMPGHIPAWQREQGLVKPGGRRRRLSGSESNMRQKVDPSTGPRRSTRSGTVNRSNQRTGRNGDPLLVEIRMKEDWVLLDARGLLRNLRWRESKRGLSCDHEDLSLSGLLALFSGDPVIDPVRNEVVFLYGEGIIPVRSTKPVGTRQSKKLLERQASMGPLTLISCDLGQTNLIAGRASAISLTHGSLGVRSSVRIELDPEIIKSFERLRKDADRLETEILTAAKETLSDEQRGEVNSHEKDSPQTAKASLCRELGLHPPSLPWGQMGPSTTFIADMLISHGRDDDAFLSHGEFPTLEKRKKFDKRFCLESRPLLSSETRKALNESLWEVKRTSSEYARLSQRKKEMARRAVNFVVEISRRKTGLSNVIVNIEDLNVRIFHGGGKQAPGWDGFFRPKSENRWFIQAIHKAFSDLAAHHGIPVIESDPQRTSMTCPECGHCDSKNRNGVRFLCKGCGASMDADFDAACRNLERVALTGKPMPKPSTSCERLLSATTGKVCSDHSLSHDAIEKAS

SEQ ID NO: 122 - protein, 793 aa, Unknown
  Description of Unknown: Cas-phi-5 sequence
MSSLPTPLELLKQKHADLFKGLQFSSKDNKMAGKVLKKDGEEAALAFLSERGVSRGELPNFRPPAKTLVVAQSRPFEEFPIYRVSEAIQLYVYSLSVKELETVPSGSSTKKEHQRFFQDSSVPDFGYTSVQGLNKIFGLARGIYLGVITRGENQLQKAKSKHEALNKKRRASGEAETEFDPTPYEYMTPERKLAKPPGVNHSIMCYVDISVDEFDFRNPDGIVLPSEYAGYCREINTAIEKGTVDRLGHLKGGPGYIPGHQRKESTTEGPKINFRKGRIRRSYTALYAKRDSRRVRQGKLALPSYRHHMMRLNSNAESAILAVIFFGKDWVVFDLRGLLRNVRWRNLFVDGSTPSTLLGMFGDPVIDPKRGVVAFCYKEQIVPVVSKSITKMVKAPELLNKLYLKSEDPLVLVAIDLGQTNPVGVGVYRVMNASLDYEVVTRFALESELLREIESYRQRTNAFEAQIRAETFDAMTSEEQEEITRVRAFSASKAKENVCHRFGMPVDAVDWATMGSNTIHIAKWVMRHGDPSLVEVLEYRKDNEIKLDKNGVPKKVKLTDKRIANLTSIRLRFSQETSKHYNDTMWELRRKHPVYQKLSKSKADFSRRVVNSIIRRVNHLVPRARIVFIIEDLKNLGKVFHGSGKRELGWDSYFEPKSENRWFIQVLHKAFSETGKHKGYYIIECWPNWTSCTCPKCSCCDSENRHGEVFRCLACGYTCNTDFGTAPDNLVKIATTGKGLPGPKKRCKGSSKGKNPKIARSSETGVSVTESGAPKVKKSSPTQTSQSSSQSAP

SEQ ID NO: 123 - protein, 441 aa, Unknown
  Description of Unknown: Cas-phi-6 sequence
MNKIEKEKTPLAKLMNENFAGLRFPFAIIKQAGKKLLKEGELKTIEYMTGKGSIEPLPNFKPPVKCLIVAKRRDLKYFPICKASCEIQSYVYSLNYKDFMDYFSTPMTSQKQHEEFFKKSGLNIEYQNVAGLNLIFNNVKNTYNGVILKVKNRNEKLKKKAIKNNYEFEEIKTFNDDGCLINKPGINNVIYCFQSISPKILKNITHLPKEYNDYDCSVDRNIIQKYVSRLDIPESQPGHVPEWQRKLPEFNNTNNPRRRRKWYSNGRNISKGYSVDQVNQAKIEDSLLAQIKIGEDWIILDIRGLLRDLNRRELISYKNKLTIKDVLGFFSDYPIIDIKKNLVTFCYKEGVIQVVSQKSIGNKKSKQLLEKLIENKPIALVSIDLGQTNPVSVKISKLNKINNKISIESFTYRFLNEEILKEIEKYRKDYDKLELKLINEA

SEQ ID NO: 124 - protein, 772 aa, Unknown
  Description of Unknown: Cas-phi-7 sequence
MSNTAVSTREHMSNKTTPPSPLSLLLRAHFPGLKFESQDYKIAGKKLRDGGPEAVISYLTGKGQAKLKDVKPPAKAFVIAQSRPFIEWDLVRVSRQIQEKIFGIPATKGRPKQDGLSETAFNEAVASLEVDGKSKLNEETRAAFYEVLGLDAPSLHAQAQNALIKSAISIREGVLKKVENRNEKNLSKTKRRKEAGEEATFVEEKAHDERGYLIHPPGVNQTIPGYQAVVIKSCPSDFIGLPSGCLAKESAEALTDYLPHDRMTIPKGQPGYVPEWQHPLLNRRKNRRRRDWYSASLNKPKATCSKRSGTPNRKNSRTDQIQSGRFKGAIPVLMRFQDEWVIIDIRGLLRNARYRKLLKEKSTIPDLLSLFTGDPSIDMRQGVCTFIYKAGQACSAKMVKTKNAPEILSELTKSGPVVLVSIDLGQTNPIAAKVSRVTQLSDGQLSHETLLRELLSNDSSDGKEIARYRVASDRLRDKLANLAVERLSPEHKSEILRAKNDTPALCKARVCAALGLNPEMIAWDKMTPYTEFLATAYLEKGGDRKVATLKPKNRPEMLRRDIKFKGTEGVRIEVSPEAAEAYREAQWDLQRTSPEYLRLSTWKQELTKRILNQLRHKAAKSSQCEVVVMAFEDLNIKMMHGNGKWADGGWDAFFIKKRENRWFMQAFHKSLTELGAHKGVPTIEVTPHRTSITCTKCGHCDKANRDGERFACQKCGFVAHADLEIATDNIERVALTGKPMPKPESERSGDAKKSVGARKAAFKPEEDAEAAE

SEQ ID NO: 125 - protein, 717 aa, Unknown
  Description of Unknown: Cas-phi-8 sequence
MIKPTVSQFLTPGFKLIRNHSRTAGLKLKNEGEEACKKFVRENEIPKDECPNFQGGPAIANIIAKSREFTEWEIYQSSLAIQEVIFTLPKDKLPEPILKEEWRAQWLSEHGLDTVPYKEAAGLNLIIKNAVNTYKGVQVKVDNKNKNNLAKINRKNEIAKLNGEQEISFEEIKAFDDKGYLLQKPSPNKSIYCYQSVSPKPFITSKYHNVNLPEEYIGYYRKSNEPIVSPYQFDRLRIPIGEPGYVPKWQYTFLSKKENKRRKLSKRIKNVSPILGIICIKKDWCVFDMRGLLRTNHWKKYHKPTDSINDLFDYFTGDPVIDTKANVVRFRYKMENGIVNYKPVREKKGKELLENICDQNGSCKLATVDVGQNNPVAIGLFELKKVNGELTKTLISRHPTPIDFCNKITAYRERYDKLESSIKLDAIKQLTSEQKIEVDNYNNNFTPQNTKQIVCSKLNINPNDLPWDKMISGTHFISEKAQVSNKSEIYFTSTDKGKTKDVMKSDYKWFQDYKPKLSKEVRDALSDIEWRLRRESLEFNKLSKSREQDARQLANWISSMCDVIGIENLVKKNNFFGGSGKREPGWDNFYKPKKENRWWINAIHKALTELSQNKGKRVILLPAMRTSITCPKCKYCDSKNRNGEKFNCLKCGIELNADIDVATENLATVAITAQSMPKPTCERSGDAKKPVRARKAKAPEFHDKLAPSYTVVLREAV

SEQ ID NO: 126 - protein, 793 aa, Unknown
  Description of Unknown: Cas-phi-9 sequence
MRSSREIGDKILMRQPAEKTAFQVFRQEVIGTQKLSGGDAKTAGRLYKQGKMEAAREWLLKGARDDVPPNFQPPAKCLVVAVSHPFEEWDISKTNHDVQAYIYAQPLQAEGHLNGLSEKWEDTSADQHKLWFEKTGVPDRGLPVQAINKIAKAAVNRAFGVVRKVENRNEKRRSRDNRIAEHNRENGLTEVVREAPEVATNADGFLLHPPGIDPSILSYASVSPVPYNSSKHSFVRLPEEYQAYNVEPDAPIPQFVVEDRFAIPPGQPGYVPEWQRLKCSTNKHRRMRQWSNQDYKPKAGRRAKPLEFQAHLTRERAKGALLVVMRIKEDWVVFDVRGLLRNVEWRKVLSEEAREKLTLKGLLDLFTGDPVIDTKRGIVTFLYKAEITKILSKRTVKTKNARDLLLRLTEPGEDGLRREVGLVAVDLGQTHPIAAAIYRIGRTSAGALESTVLHRQGLREDQKEKLKEYRKRHTALDSRLRKEAFETLSVEQQKEIVTVSGSGAQITKDKVCNYLGVDPSTLPWEKMGSYTHFISDDFLRRGGDPNIVHFDRQPKKGKVSKKSQRIKRSDSQWVGRMRPRLSQETAKARMEADWAAQNENEEYKRLARSKQELARWCVNTLLQNTRCITQCDEIVVVIEDLNVKSLHGKGAREPGWDNFFTPKTENRWFIQILHKTFSELPKHRGEHVIEGCPLRTSITCPACSYCDKNSRNGEKFVCVACGATFHADFEVATYNLVRLATTGMPMPKSLERQGGGEKAGGARKARKKAKQVEKIVVQANANVTMNGASLHSP

SEQ ID NO: 127 - protein, 812 aa, Unknown
  Description of Unknown: Cas-phi-10 sequence
MDMLDTETNYATETPAQQQDYSPKPPKKAQRAPKGFSKKARPEKKPPKPITLFTQKHFSGVRFLKRVIRDASKILKLSESRTITFLEQAIERDGSAPPDVTPPVHNTIMAVTRPFEEWPEVILSKALQKHCYALTKKIKIKTWPKKGPGKKCLAAWSARTKIPLIPGQVQATNGLFDRIGSIYDGVEKKVTNRNANKKLEYDEAIKEGRNPAVPEYETAYNIDGTLINKPGYNPNLYITQSRTPRLITEADRPLVEKILWQMVEKKTQSRNQARRARLEKAAHLQGLPVPKFVPEKVDRSQKIEIRIIDPLDKIEPYMPQDRMAIKASQDGHVPYWQRPFLSKRRNRRVRAGWGKQVSSIQAWLTGALLVIVRLGNEAFLADIRGALRNAQWRKLLKPDATYQSLFNLFTGDPVVNTRTNHLTMAYREGVVNIVKSRSFKGRQTREHLLTLLGQGKTVAGVSFDLGQKHAAGLLAAHFGLGEDGNPVFTPIQACFLPQRYLDSLTNYRNRYDALTLDMRRQSLLALTPAQQQEFADAQRDPGGQAKRACCLKLNLNPDEIRWDLVSGISTMISDLYIERGGDPRDVHQQVETKPKGKRKSEIRILKIRDGKWAYDFRPKIADETRKAQREQLWKLQKASSEFERLSRYKINIARAIANWALQWGRELSGCDIVIPVLEDLNVGSKFFDGKGKWLLGWDNRFTPKKENRWFIKVLHKAVAELAPHRGVPVYEVMPHRTSMTCPACHYCHPTNREGDRFECQSCHVVKNTDRDVAPYNILRVAVEGKTLDRWQAEKKPQAEPDRPMILIDNQES

SEQ ID NO: 128 - protein, 1367 aa, Streptococcus pyogenes
MDKKYSIGLAIGTNSVGWAVITDEYKVPSKKFKVLGNTDRHSIKKNLIGALLFDSGETAEATRLKRTARRRYTRRKNRICYLQEIFSNEMAKVDDSFFHRLEESFVEEDKKHERHPIFGNIVDEVAYHEKYPTIYHLRKKLVDSTDKADLRLIYLALAHMIKFRGHFLIEGDLNPDNSDVDKLFIQLVQTYNQLFEENPINASGVDAKAILSARLSKSRRLENLIAQLPGEKKNGLFGNLIALSLGLTPNFKSNFDLAEDAKLQLSKDTYDDDLDNLLAQIGDQYADLFLAAKNLSDAILLSDILRVNTEITKAPLSASMIKRYDEHHQDLTLLKALVRQQLPEKYKEIFFDQSKNGYAGYIDGGASQEEFYKFIKPILEKMDGTEELLVKLNREDLLRKQRTFDNGSIPHQIHLGELHAILRRQEDFYPFLKDNREKIEKILTFRIPYYVGPLARGNSRFAWMTRKSEETITPWNFEEVVDKGASAQSFIERMTNFDKNLPNEKVLPKHSLLYEYFTVYNELTKVKYVTEGMRKPAFLSGEQKKAIVDLLFKTNRKVTVKQLKEDYFKKIECFDSVEISGVEDRFNASLGTYHDLLKIIKDKDFLDNEENEDILEDIVLTLTLFEDREMIEERLKTYAHLFDDKVMKQLKRRRYTGWGRLSRKLINGIRDKQSGKTILDFLKSDGFANRNFMQLIHDDSLTFKEDIQKAQVSGQGDSLHEHIANLAGSPAIKKGILQTVKVVDELVKVMGRHKPENIVIEMARENQTTQKGQKNSRERMKRIEEGIKELGSQILKEHPVENTQLQNEKLYLYYLQNGRDMYVDQELDINRLSDYDVDHIVPQSFLKDDSIDNKVLTRSDKNRGKSDNVPSEEVVKKMKNYWRQLLNAKLITQRKFDNLTKAERGGLSELDKAGFIKRQLVETRQITKHVAQILDSRMNTKYDENDKLIREVKVITLKSKLVSDFRKDFQFYKVREINNYHHAHDAYLNAVVGTALIKKYPKLESEFVYGDYKVYDVRKMIAKSEQEIGKATAKYFFYSNIMNFFKTEITLANGEIRKRPLIETNGETGEIVWDKGRDFATVRKVLSMPQVNIVKKTEVQTGGFSKESILPKRNSDKLIARKKDWDPKKYGGFESPTVAYSVLVVAKVEKGKSKKLKSVKELLGITIMERSSFEKNPIDFLEAKGYKEVKKDLIIKLPKYSLFELENGRKRMLASAGELQKGNELALPSKYVNFLYLASHYEKLKGSPEDNEQKQLFVEQHKHYLDEIIEQISEFSKRVILADANLDKVLSAYNKHRDKPIREQAENIIHLFTLTNLGAPAAFKYFDTTIDRKQYRSTKEVLDATLIHQSITGLYETRIDLSQLGGD

SEQ ID NO: 129 - protein, 1368 aa, Streptococcus pyogenes
MDKKYSIGLAIGTNSVGWAVITDEYKVPSKKFKVLGNTDRHSIKKNLIGALLFDSGETAEATRLKRTARRRYTRRKNRICYLQEIFSNEMAKVDDSFFHRLEESFLVEEDKKHERHPIFGNIVDEVAYHEKYPTIYHLRKKLVDSTDKADLRLIYLALAHMIKFRGHFLIEGDLNPDNSDVDKLFIQLVQTYNQLFEENPINASGVDAKAILSARLSKSRRLENLIAQLPGEKKNGLFGNLIALSLGLTPNFKSNFDLAEDAKLQLSKDTYDDDLDNLLAQIGDQYADLFLAAKNLSDAILLSDILRVNTEITKAPLSASMIKRYDEHHQDLTLLKALVRQQLPEKYKEIFFDQSKNGYAGYIDGGASQEEFYKFIKPILEKMDGTEELLVKLNREDLLRKQRTFDNGSIPHQIHLGELHAILRRQEDFYPFLKDNREKIEKILTFRIPYYVGPLARGNSRFAWMTRKSEETITPWNFEEVVDKGASAQSFIERMTNFDKNLPNEKVLPKHSLLYEYFTVYNELTKVKYVTEGMRKPAFLSGEQKKAIVDLLFKTNRKVTVKQLKEDYFKKIECFDSVEISGVEDRFNASLGTYHDLLKIIKDKDFLDNEENEDILEDIVLTLTLFEDREMIEERLKTYAHLFDDKVMKQLKRRRYTGWGRLSRKLINGIRDKQSGKTILDFLKSDGFANRNFMQLIHDDSLTFKEDIQKAQVSGQGDSLHEHIANLAGSPAIKKGILQTVKVVDELVKVMGRHKPENIVIEMARENQTTQKGQKNSRERMKRIEEGIKELGSQILKEHPVENTQLQNEKLYLYYLQNGRDMYVDQELDINRLSDYDVDHIVPQSFLKDDSIDNKVLTRSDKNRGKSDNVPSEEVVKKMKNYWRQLLNAKLITQRKFDNLTKAERGGLSELDKAGFIKRQLVETRQITKHVAQILDSRMNTKYDENDKLIREVKVITLKSKLVSDFRKDFQFYKVREINNYHHAHDAYLNAVVGTALIKKYPKLESEFVYGDYKVYDVRKMIAKSEQEIGKATAKYFFYSNIMNFFKTEITLANGEIRKRPLIETNGETGEIVWDKGRDFATVRKVLSMPQVNIVKKTEVQTGGFSKESILPKRNSDKLIARKKDWDPKKYGGFVSPTVAYSVLVVAKVEKGKSKKLKSVKELLGITIMERSSFEKNPIDFLEAKGYKEVKKDLIIKLPKYSLFELENGRKRMLASAGELQKGNELALPSKYVNFLYLASHYEKLKGSPEDNEQKQLFVEQHKHYLDEIIEQISEFSKRVILADANLDKVLSAYNKHRDKPIREQAENIIHLFTLTNLGAPAAFKYFDTTIDRKQYRSTKEVLDATLIHQSITGLYETRIDLSQLGGD

SEQ ID NO: 130 - protein, 1368 aa, Streptococcus pyogenes
MDKKYSIGLAIGTNSVGWAVITDEYKVPSKKFKVLGNTDRHSIKKNLIGALLFDSGETAEATRLKRTARRRYTRRKNRICYLQEIFSNEMAKVDDSFFHRLEESFLVEEDKKHERHPIFGNIVDEVAYHEKYPTIYHLRKKLVDSTDKADLRLIYLALAHMIKFRGHFLIEGDLNPDNSDVDKLFIQLVQTYNQLFEENPINASGVDAKAILSARLSKSRRLENLIAQLPGEKKNGLFGNLIALSLGLTPNFKSNFDLAEDAKLQLSKDTYDDDLDNLLAQIGDQYADLFLAAKNLSDAILLSDILRVNTEITKAPLSASMIKRYDEHHQDLTLLKALVRQQLPEKYKEIFFDQSKNGYAGYIDGGASQEEFYKFIKPILEKMDGTEELLVKLNREDLLRKQRTFDNGSIPHQIHLGELHAILRRQEDFYPFLKDNREKIEKILTFRIPYYVGPLARGNSRFAWMTRKSEETITPWNFEEVVDKGASAQSFIERMTNFDKNLPNEKVLPKHSLLYEYFTVYNELTKVKYVTEGMRKPAFLSGEQKKAIVDLLFKTNRKVTVKQLKEDYFKKIECFDSVEISGVEDRFNASLGTYHDLLKIIKDKDFLDNEENEDILEDIVLTLTLFEDREMIEERLKTYAHLFDDKVMKQLKRRRYTGWGRLSRKLINGIRDKQSGKTILDFLKSDGFANRNFMQLIHDDSLTFKEDIQKAQVSGQGDSLHEHIANLAGSPAIKKGILQTVKVVDELVKVMGRHKPENIVIEMARENQTTQKGQKNSRERMKRIEEGIKELGSQILKEHPVENTQLQNEKLYLYYLQNGRDMYVDQELDINRLSDYDVDHIVPQSFLKDDSIDNKVLTRSDKNRGKSDNVPSEEVVKKMKNYWRQLLNAKLITQRKFDNLTKAERGGLSELDKAGFIKRQLVETRQITKHVAQILDSRMNTKYDENDKLIREVKVITLKSKLVSDFRKDFQFYKVREINNYHHAHDAYLNAVVGTALIKKYPKLESEFVYGDYKVYDVRKMIAKSEQEIGKATAKYFFYSNIMNFFKTEITLANGEIRKRPLIETNGETGEIVWDKGRDFATVRKVLSMPQVNIVKKTEVQTGGFSKESILPKRNSDKLIARKKDWDPKKYGGFVSPTVAYSVLVVAKVEKGKSKKLKSVKELLGITIMERSSFEKNPIDFLEAKGYKEVKKDLIIKLPKYSLFELENGRKRMLASARELQKGNELALPSKYVNFLYLASHYEKLKGSPEDNEQKQLFVEQHKHYLDEIIEQISEFSKRVILADANLDKVLSAYNKHRDKPIREQAENIIHLFTLTNLGAPAAFKYFDTTIDRKEYRSTKEVLDATLIHQSITGLYETRIDLSQLGGD

SEQ ID NO: 131 - protein, 1359 aa, Artificial Sequence
  Description of Artificial Sequence: Synthetic polypeptide
MDKKYSIGLDIGTNSVGWAVITDDYKVPSKKFKVLGNTDRHSIKKNLIGALLFGSGETAEATRLKRTARRRYTRRKNRICYLQEIFSNEMAKVDDSFFHRLEESFLVEEDKKHERHPIFGNIVDEVAYHEKYPTIYHLRKKLADSTDKADLRLIYLALAHMIKFRGHFLIEGDLNPDNSDVDKLFIQLVQIYNQLFEENPINASRVDAKAILSARLSKSRRLENLIAQLPGEKRNGLFGNLIALSLGLTPNFKSNFDLAEDAKLQLSKDTYDDDLDNLLAQIGDQYADLFLAAKNLSDAILLSDILRVNSEITKAPLSASMIKRYDEHHQDLTLLKALVRQQLPEKYKEIFFDQSKNGYAGYIDGGASQEEFYKFIKPILEKMDGTEELLVKLNREDLLRKQRTFDNGSIPHQIHLGELHAILRRQEDFYPFLKDNREKIEKILTFRIPYYVGPLARGNSRFAWMTRKSEETITPWNFEEVVDKGASAQSFIERMTNFDKNLPNEKVLPKHSLLYEYFTVYNELTKVKYVTEGMRKPAFLSGEQKKAIVDLLFKTNRKVTVKQLKEDYFKKIECFDSVEISGVEDRFNASLGAYHDLLKIIKDKDFLDNEENEDILEDIVLTLTLFEDRGMIEERLKTYAHLFDDKVMKQLKRRRYTGWGRLSRKLINGIRDKQSGKTILDFLKSDGFANRNFMQLIHDDSLTFKEDIQKAQVSGQGHSLHEQIANLAGSPAIKKGILQTVKIVDELVKVMGHKPENIVIEMARENQTTQKGQKNSRERMKRIEEGIKELGSQILKEHPVENTQLQNEKLYLYYLQNGRDMYVDQELDINRLSDYDVDHIVPQSFIKDDSIDNKVLTRSDKNRGKSDNVPSEEVVKKMKNYWRQLLNAKLITQRKFDNLTKAERGGLSELDKAGFIKRQLVETRQITKHVAQILDSRMNTKYDENDKLIREVKVITLKSKLVSDFRKDFQFYKVREINNYHHAHDAYLNAVVGTALIKKYPKLESEFVYGDYKVYDVRKMIAKSEQEIGKATAKYFFYSNIMNFFKTEITLANGEIRKRPLIETNGETGEIVWDKGRDFATVRKVLSMPQVNIVKKTEIQTVGQNGGLFDDNPKSPLEVTPSKLVPLKKELNPKKYGGYQKPTTAYPVLLITDTKQLIPISVMNKKQFEQNPVKFLRDRGYQQVGKNDFIKLPKYTLVDIGDGIKRLWASSKEIHKGNQLVVSKKSQILLYHAHHLDSDLSNDYLQNHNQQFDVLFNEIISFSKKCKLGKEHIQKIENVYSNKKNSASIEELAESFIKLLGFTQLGATSPFNFLGVKLNQKQYKGKKDYILPCTEGTLIRQSITGLYETRVDLSKIGED

SEQ ID NO: 132 - protein, 29 aa, Unknown
  Description of Unknown: nuclear localization sequence
PKKKRKVEGADKRTADGSEFESPKKKRKV

SEQ ID NO: 133 - protein, 23 aa, Unknown
  Description of Unknown: nuclear localization sequence
RKSGKIAAIVVKRPRKPKKKRKV

SEQ ID NO: 134 - protein, 20 aa, Artificial Sequence
  Description of Artificial Sequence: Synthetic peptide
GSSGSETPGTSESATPESSG

SEQ ID NO: 135 - DNA, 18 bp, Artificial Sequence
  Description of Artificial Sequence: Synthetic oligonucleotide
ggaggctctggaggaagc

SEQ ID NO: 136 - DNA, 60 bp, Artificial Sequence
  Description of Artificial Sequence: Synthetic oligonucleotide
ggctcttctggatctgaaacacctggcacaagcgagagcgccacccctgagagctctggc

SEQ ID NO: 137 - protein, 17 aa, Unknown
  Description of Unknown: nuclear localization signal sequence
MAPKKKRKVGIHGVPAA

SEQ ID NO: 138 - DNA, 51 bp, Unknown
  Description of Unknown: nuclear localization signal sequence
atggccccaaagaagaagcggaaggtcggtatccacggagtcccagcagcc

SEQ ID NO: 139 - protein, 178 aa, Escherichia coli
MRRAFITGVFFLSEVEFSHEYWMRHALTLAKRAWDEREVPVGAVLVHNNRVIGEGWNRPIGRHDPTAHAEIMALRQGGLVMQNYRLIDATLYVTLEPCVMCAGAMIHSRIGRVVFGARDAKTGAAGSLMDVLHHPGMNHRVEITEGILADECAALLSDFFRMRRQEIKAQKKAQSSTD

SEQ ID NO: 140 - protein, 8 aa, Artificial Sequence
  Description of Artificial Sequence: Synthetic peptide
SGGSSGGS

SEQ ID NO: 141 - protein, 1609 aa, Artificial Sequence
  Description of Artificial Sequence: Synthetic polypeptide
MSEVEFSHEYWMRHALTLAKRARDEREVPVGAVLVLNNRVIGEGWNRAIGLHDPTAHAEIMALRQGGLVMQNYRLIDATLYVTFEPCVMCAGAMIHSRIGRVVFGVRNAKTGAAGSLMDVLHYPGMNHRVEITEGILADECAALLCTFFRMPRQVFNAQKKAQSSTDSGGSSGGSSGSETPGTSESATPESSGGSSGGSEIGKATAKYFFYSNIMNFFKTEITLANGEIRKRPLIETNGETGEIVWDKGRDFATVRKVLSMPQVNIVKKTEVQTGGFSKESILPKRNSDKLIARKKDWDPKKYGGFMQPTVAYSVLVVAKVEKGKSKKLKSVKELLGITIMERSSFEKNPIDFLEAKGYKEVKKDLIIKLPKYSLFELENGRKRMLASAKFLQKGNELALPSKYVNFLYLASHYEKLKGSPEDNEQKQLFVEQHKHYLDEIIEQISEFSKRVILADANLDKVLSAYNKHRDKPIREQAENIIHLFTLTNLGAPRAFKYFDTTIARKEYRSTKEVLDATLIHQSITGLYETRIDLSQLGGDGGSGGSGGSGGSGGSGGSGGMDKKYSIGLAIGTNSVGWAVITDEYKVPSKKFKVLGNTDRHSIKKNLIGALLFDSGETAEATRLKRTARRRYTRRKNRICYLQEIFSNEMAKVDDSFFHRLEESFLVEEDKKHERHPIFGNIVDEVAYHEKYPTIYHLRKKLVDSTDKADLRLIYLALAHMIKFRGHFLIEGDLNPDNSDVDKLFIQLVQTYNQLFEENPINASGVDAKAILSARLSKSRRLENLIAQLPGEKKNGLFGNLIALSLGLTPNFKSNFDLAEDAKLQLSKDTYDDDLDNLLAQIGDQYADLFLAAKNLSDAILLSDILRVNTEITKAPLSASMIKRYDEHHQDLTLLKALVRQQLPEKYKEIFFDQSKNGYAGYIDGGASQEEFYKFIKPILEKMDGTEELLVKLNREDLLRKQRTFDNGSIPHQIHLGELHAILRRQEDFYPFLKDNREKIEKILTFRIPYYVGPLARGNSRFAWMTRKSEETITPWNFEEVVDKGASAQSFIERMTNFDKNLPNEKVLPKHSLLYEYFTVYNELTKVKYVTEGMRKPAFLSGEQKKAIVDLLFKTNRKVTVKQLKEDYFKKIECFDSVEISGVEDRFNASLGTYHDLLKIIKDKDFLDNEENEDILEDIVLTLTLFEDREMIEERLKTYAHLFDDKVMKQLKRRRYTGWGRLSRKLINGIRDKQSGKTILDFLKSDGFANRNFMQLIHDDSLTFKEDIQKAQVSGQGDSLHEHIANLAGSPAIKKGILQTVKVVDELVKVMGRHKPENIVIEMARENQTTQKGQKNSRERMKRIEEGIKELGSQILKEHPVENTQLQNEKLYLYYLQNGRDMYVDQELDINRLSDYDVDHIVPQSFLKDDSIDNKVLTRSDKNRGKSDNVPSEEVVKKMKNYWRQLLNAKLITQRKFDNLTKAERGGLSELDKAGFIKRQLVETRQITKHVAQILDSRMNTKYDENDKLIREVKVITLKSKLVSDFRKDFQFYKVREINNYHHAHDAYLNAVVGTALIKKYPKLESEFVYGDYKVYDVRKMIAKSEQEGADKRTADGSEFESPKKKRKV

SEQ ID NO: 142 - protein, 1807 aa, Artificial Sequence
  Description of Artificial Sequence: Synthetic polypeptide
MSEVEFSHEYWMRHALTLAKRAWDEREVPVGAVLVHNNRVIGEGWNRPIGRHDPTAHAEIMALRQGGLVMQNYRLIDATLYVTLEPCVMCAGAMIHSRIGRVVFGARDAKTGAAGSLMDVLHHPGMNHRVEITEGILADECAALLSDFFRMRRQEIKAQKKAQSSTDGGSSGGSSGSETPGTSESATPESSGGSSGGSMSEVEFSHEYWMRHALTLAKRARDEREVPVGAVLVLNNRVIGEGWNRAIGLHDPTAHAEIMALRQGGLVMQNYRLIDATLYVTFEPCVMCAGAMIHSRIGRVVFGVRNAKTGAAGSLMDVLHYPGMNHRVEITEGILADECAALLCTFFRMPRQVFNAQKKAQSSTDSGGSSGGSSGSETPGTSESATPESSGGSSGGSEIGKATAKYFFYSNIMNFFKTEITLANGEIRKRPLIETNGETGEIVWDKGRDFATVRKVLSMPQVNIVKKTEVQTGGFSKESILPKRNSDKLIARKKDWDPKKYGGFMQPTVAYSVLVVAKVEKGKSKKLKSVKELLGITIMERSSFEKNPIDFLEAKGYKEVKKDLIIKLPKYSLFELENGRKRMLASAKFLQKGNELALPSKYVNFLYLASHYEKLKGSPEDNEQKQLFVEQHKHYLDEIIEQISEFSKRVILADANLDKVLSAYNKHRDKPIREQAENIIHLFTLTNLGAPRAFKYFDTTIARKEYRSTKEVLDATLIHQSITGLYETRIDLSQLGGDGGSGGSGGSGGSGGSGGSGGMDKKYSIGLAIGTNSVGWAVITDEYKVPSKKFKVLGNTDRHSIKKNLIGALLFDSGETAEATRLKRTARRRYTRRKNRICYLQEIFSNEMAKVDDSFFHRLEESFLVEEDKKHERHPIFGNIVDEVAYHEKYPTIYHLRKKLVDSTDKADLRLIYLALAHMIKFRGHFLIEGDLNPDNSDVDKLFIQLVQTYNQLFEENPINASGVDAKAILSARLSKSRRLENLIAQLPGEKKNGLFGNLIALSLGLTPNFKSNFDLAEDAKLQLSKDTYDDDLDNLLAQIGDQYADLFLAAKNLSDAILLSDILRVNTEITKAPLSASMIKRYDEHHQDLTLLKALVRQQLPEKYKEIFFDQSKNGYAGYIDGGASQEEFYKFIKPILEKMDGTEELLVKLNREDLLRKQRTFDNGSIPHQIHLGELHAILRRQEDFYPFLKDNREKIEKILTFRIPYYVGPLARGNSRFAWMTRKSEETITPWNFEEVVDKGASAQSFIERMTNFDKNLPNEKVLPKHSLLYEYFTVYNELTKVKYVTEGMRKPAFLSGEQKKAIVDLLFKTNRKVTVKQLKEDYFKKIECFDSVEISGVEDRFNASLGTYHDLLKIIKDKDFLDNEENEDILEDIVLTLTLFEDREMIEERLKTYAHLFDDKVMKQLKRRRYTGWGRLSRKLINGIRDKQSGKTILDFLKSDGFANRNFMQLIHDDSLTFKEDIQKAQVSGQGDSLHEHIANLAGSPAIKKGILQTVKVVDELVKVMGRHKPENIVIEMARENQTTQKGQKNSRERMKRIEEGIKELGSQILKEHPVENTQLQNEKLYLYYLQNGRDMYVDQELDINRLSDYDVDHIVPQSFLKDDSIDNKVLTRSDKNRGKSDNVPSEEVVKKMKNYWRQLLNAKLITQRKFDNLTKAERGGLSELDKAGFIKRQLVETRQITKHVAQILDSRMNTKYDENDKLIREVKVITLKSKLVSDFRKDFQFYKVREINNYHHAHDAYLNAVVGTALIKKYPKLESEFVYGDYKVYDVRKMIAKSEQEGADKRTADGSEFESPKKKRKV

SEQ ID NO: 143 - protein, 1588 aa, Artificial Sequence
  Description of Artificial Sequence: Synthetic polypeptide
MSEVEFSHEYWMRHALTLAKRARDEREVPVGAVLVLNNRVIGEGWNRAIGLHDPTAHAEIMALRQGGLVMQNYRLIDATLYVTFEPCVMCAGAMIHSRIGRVVFGVRNAKTGAAGSLMDVLHHPGMNHRVEITEGILADECAALLCRFFRMPRRVFNAQKKAQSSTDSGGSSGGSSGSETPGTSESATPESSGGSSGGSDKKYSIGLAIGTNSVGWAVITDEYKVPSKKFKVLGNTDRHSIKKNLIGALLFDSGETAEATRLKRTARRRYTRRKNRICYLQEIFSNEMAKVDDSFFHRLEESFLVEEDKKHERHPIFGNIVDEVAYHEKYPTIYHLRKKLVDSTDKADLRLIYLALAHMIKFRGHFLIEGDLNPDNSDVDKLFIQLVQTYNQLFEENPINASGVDAKAILSARLSKSRRLENLIAQLPGEKKNGLFGNLIALSLGLTPNFKSNFDLAEDAKLQLSKDTYDDDLDNLLAQIGDQYADLFLAAKNLSDAILLSDILRVNTEITKAPLSASMIKRYDEHHQDLTLLKALVRQQLPEKYKEIFFDQSKNGYAGYIDGGASQEEFYKFIKPILEKMDGTEELLVKLNREDLLRKQRTFDNGSIPHQIHLGELHAILRRQEDFYPFLKDNREKIEKILTFRIPYYVGPLARGNSRFAWMTRKSEETITPWNFEEVVDKGASAQSFIERMTNFDKNLPNEKVLPKHSLLYEYFTVYNELTKVKYVTEGMRKPAFLSGEQKKAIVDLLFKTNRKVTVKQLKEDYFKKIECFDSVEISGVEDRFNASLGTYHDLLKIIKDKDFLDNEENEDILEDIVLTLTLFEDREMIEERLKTYAHLFDDKVMKQLKRRRYTGWGRLSRKLINGIRDKQSGKTILDFLKSDGFANRNFMQLIHDDSLTFKEDIQKAQVSGQGDSLHEHIANLAGSPAIKKGILQTVKVVDELVKVMGRHKPENIVIEMARENQTTQKGQKNSRERMKRIEEGIKELGSQILKEHPVENTQLQNEKLYLYYLQNGRDMYVDQELDINRLSDYDVDHIVPQSFLKDDSIDNKVLTRSDKNRGKSDNVPSEEVVKKMKNYWRQLLNAKLITQRKFDNLTKAERGGLSELDKAGFIKRQLVETRQITKHVAQILDSRMNTKYDENDKLIREVKVITLKSKLVSDFRKDFQFYKVREINNYHHAHDAYLNAVVGTALIKKYPKLESEFVYGDYKVYDVRKMIAKSEQEIGKATAKYFFYSNIMNFFKTEITLANGEIRKRPLIETNGETGEIVWDKGRDFATVRKVLSMPQVNIVKKTEVQTGGFSKESILPKRNSDKLIARKKDWDPKKYGGFDSPTVAYSVLVVAKVEKGKSKKLKSVKELLGITIMERSSFEKNPIDFLEAKGYKEVKKDLIIKLPKYSLFELENGRKRMLASAGELQKGNELALPSKYVNFLYLASHYEKLKGSPEDNEQKQLFVEQHKHYLDEIIEQISEFSKRVILADANLDKVLSAYNKHRDKPIREQAENIIHLFTLTNLGAPAAFKYFDTTIDRKRYTSTKEVLDATLIHQSITGLYETRIDLSQLGGDEGADKRTADGSEFESPKKKRKV

SEQ ID NO: 144 - protein, 1786 aa, Artificial Sequence
  Description of Artificial Sequence: Synthetic polypeptide
MSEVEFSHEYWMRHALTLAKRAWDEREVPVGAVLVHNNRVIGEGWNRPIGRHDPTAHAEIMALRQGGLVMQNYRLIDATLYVTLEPCVMCAGAMIHSRIGRVVFGARDAKTGAAGSLMDVLHHPGMNHRVEITEGILADECAALLSDFFRMRRQEIKAQKKAQSSTDSGGSSGGSSGSETPGTSESATPESSGGSSGGSSEVEFSHEYWMRHALTLAKRARDEREVPVGAVLVLNNRVIGEGWNRAIGLHDPTAHAEIMALRQGGLVMQNYRLIDATLYVTFEPCVMCAGAMIHSRIGRVVFGVRNAKTGAAGSLMDVLHHPGMNHRVEITEGILADECAALLCRFFRMPRRVFNAQKKAQSSTDSGGSSGGSSGSETPGTSESATPESSGGSSGGSDKKYSIGLAIGTNSVGWAVITDEYKVPSKKFKVLGNTDRHSIKKNLIGALLFDSGETAEATRLKRTARRRYTRRKNRICYLQEIFSNEMAKVDDSFFHRLEESFLVEEDKKHERHPIFGNIVDEVAYHEKYPTIYHLRKKLVDSTDKADLRLIYLALAHMIKFRGHFLIEGDLNPDNSDVDKLFIQLVQTYNQLFEENPINASGVDAKAILSARLSKSRRLENLIAQLPGEKKNGLFGNLIALSLGLTPNFKSNFDLAEDAKLQLSKDTYDDDLDNLLAQIGDQYADLFLAAKNLSDAILLSDILRVNTEITKAPLSASMIKRYDEHHQDLTLLKALVRQQLPEKYKEIFFDQSKNGYAGYIDGGASQEEFYKFIKPILEKMDGTEELLVKLNREDLLRKQRTFDNGSIPHQIHLGELHAILRRQEDFYPFLKDNREKIEKILTFRIPYYVGPLARGNSRFAWMTRKSEETITPWNFEEVVDKGASAQSFIERMTNFDKNLPNEKVLPKHSLLYEYFTVYNELTKVKYVTEGMRKPAFLSGEQKKAIVDLLFKTNRKVTVKQLKEDYFKKIECFDSVEISGVEDRFNASLGTYHDLLKIIKDKDFLDNEENEDILEDIVLTLTLFEDREMIEERLKTYAHLFDDKVMKQLKRRRYTGWGRLSRKLINGIRDKQSGKTILDFLKSDGFANRNFMQLIHDDSLTFKEDIQKAQVSGQGDSLHEHIANLAGSPAIKKGILQTVKVVDELVKVMGRHKPENIVIEMARENQTTQKGQKNSRERMKRIEEGIKELGSQILKEHPVENTQLQNEKLYLYYLQNGRDMYVDQELDINRLSDYDVDHIVPQSFLKDDSIDNKVLTRSDKNRGKSDNVPSEEVVKKMKNYWRQLLNAKLITQRKFDNLTKAERGGLSELDKAGFIKRQLVETRQITKHVAQILDSRMNTKYDENDKLIREVKVITLKSKLVSDFRKDFQFYKVREINNYHHAHDAYLNAVVGTALIKKYPKLESEFVYGDYKVYDVRKMIAKSEQEIGKATAKYFFYSNIMNFFKTEITLANGEIRKRPLIETNGETGEIVWDKGRDFATVRKVLSMPQVNIVKKTEVQTGGFSKESILPKRNSDKLIARKKDWDPKKYGGFDSPTVAYSVLVVAKVEKGKSKKLKSVKELLGITIMERSSFEKNPIDFLEAKGYKEVKKDLIIKLPKYSLFELENGRKRMLASAGELQKGNELALPSKYVNFLYLASHYEKLKGSPEDNEQKQLFVEQHKHYLDEIIEQISEFSKRVILADANLDKVLSAYNKHRDKPIREQAENIIHLFTLTNLGAPAAFKYFDTTIDRKRYTSTKEVLDATLIHQSITGLYETRIDLSQLGGDEGADKRTADGSEFESPKKKRKV

SEQ ID NO: 145 - protein, 1588 aa, Artificial Sequence
  Description of Artificial Sequence: Synthetic polypeptide
MSEVEFSHEYWMRHALTLAKRARDEREVPVGAVLVLNNRVIGEGWNRAIGLHDPTAHAEIMALRQGGLVMQNYRLYDATLYVTFEPCVMCAGAMIHSRIGRVVFGVRNAKTGAAGSLMDVLHHPGMNHRVEITEGILADECAALLCRFFRMPRRVFNAQKKAQSSTDSGGSSGGSSGSETPGTSESATPESSGGSSGGSDKKYSIGLAIGTNSVGWAVITDEYKVPSKKFKVLGNTDRHSIKKNLIGALLFDSGETAEATRLKRTARRRYTRRKNRICYLQEIFSNEMAKVDDSFFHRLEESFLVEEDKKHERHPIFGNIVDEVAYHEKYPTIYHLRKKLVDSTDKADLRLIYLALAHMIKFRGHFLIEGDLNPDNSDVDKLFIQLVQTYNQLFEENPINASGVDAKAILSARLSKSRRLENLIAQLPGEKKNGLFGNLIALSLGLTPNFKSNFDLAEDAKLQLSKDTYDDDLDNLLAQIGDQYADLFLAAKNLSDAILLSDILRVNTEITKAPLSASMIKRYDEHHQDLTLLKALVRQQLPEKYKEIFFDQSKNGYAGYIDGGASQEEFYKFIKPILEKMDGTEELLVKLNREDLLRKQRTFDNGSIPHQIHLGELHAILRRQEDFYPFLKDNREKIEKILTFRIPYYVGPLARGNSRFAWMTRKSEETITPWNFEEVVDKGASAQSFIERMTNFDKNLPNEKVLPKHSLLYEYFTVYNELTKVKYVTEGMRKPAFLSGEQKKAIVDLLFKTNRKVTVKQLKEDYFKKIECFDSVEISGVEDRFNASLGTYHDLLKIIKDKDFLDNEENEDILEDIVLTLTLFEDREMIEERLKTYAHLFDDKVMKQLKRRRYTGWGRLSRKLINGIRDKQSGKTILDFLKSDGFANRNFMQLIHDDSLTFKEDIQKAQVSGQGDSLHEHIANLAGSPAIKKGILQTVKVVDELVKVMGRHKPENIVIEMARENQTTQKGQKNSRERMKRIEEGIKELGSQILKEHPVENTQLQNEKLYLYYLQNGRDMYVDQELDINRLSDYDVDHIVPQSFLKDDSIDNKVLTRSDKNRGKSDNVPSEEVVKKMKNYWRQLLNAKLITQRKFDNLTKAERGGLSELDKAGFIKRQLVETRQITKHVAQILDSRMNTKYDENDKLIREVKVITLKSKLVSDFRKDFQFYKVREINNYHHAHDAYLNAVVGTALIKKYPKLESEFVYGDYKVYDVRKMIAKSEQEIGKATAKYFFYSNIMNFFKTEITLANGEIRKRPLIETNGETGEIVWDKGRDFATVRKVLSMPQVNIVKKTEVQTGGFSKESILPKRNSDKLIARKKDWDPKKYGGFDSPTVAYSVLVVAKVEKGKSKKLKSVKELLGITIMERSSFEKNPIDFLEAKGYKEVKKDLIIKLPKYSLFELENGRKRMLASAGELQKGNELALPSKYVNFLYLASHYEKLKGSPEDNEQKQLFVEQHKHYLDEIIEQISEFSKRVILADANLDKVLSAYNKHRDKPIREQAENIIHLFTLTNLGAPAAFKYFDTTIDRKRYTSTKEVLDATLIHQSITGLYETRIDLSQLGGDEGADKRTADGSEFESPKKKRKV

SEQ ID NO: 146 - protein, 1786 aa, Artificial Sequence
  Description of Artificial Sequence: Synthetic polypeptide
MSEVEFSHEYWMRHALTLAKRAWDEREVPVGAVLVHNNRVIGEGWNRPIGRHDPTAHAEIMALRQGGLVMQNYRLIDATLYVTLEPCVMCAGAMIHSRIGRVVFGARDAKTGAAGSLMDVLHHPGMNHRVEITEGILADECAALLSDFFRMRRQEIKAQKKAQSSTDSGGSSGGSSGSETPGTSESATPESSGGSSGGSSEVEFSHEYWMRHALTLAKRARDEREVPVGAVLVLNNRVIGEGWNRAIGLHDPTAHAEIMALRQGGLVMQNYRLYDATLYVTFEPCVMCAGAMIHSRIGRVVFGVRNAKTGAAGSLMDVLHHPGMNHRVEITEGILADECAALLCRFFRMPRRVFNAQKKAQSSTDSGGSSGGSSGSETPGTSESATPESSGGSSGGSDKKYSIGLAIGTNSVGWAVITDEYKVPSKKFKVLGNTDRHSIKKNLIGALLFDSGETAEATRLKRTARRRYTRRKNRICYLQEIFSNEMAKVDDSFFHRLEESFLVEEDKKHERHPIFGNIVDEVAYHEKYPTIYHLRKKLVDSTDKADLRLIYLALAHMIKFRGHFLIEGDLNPDNSDVDKLFIQLVQTYNQLFEENPINASGVDAKAILSARLSKSRRLENLIAQLPGEKKNGLFGNLIALSLGLTPNFKSNFDLAEDAKLQLSKDTYDDDLDNLLAQIGDQYADLFLAAKNLSDAILLSDILRVNTEITKAPLSASMIKRYDEHHQDLTLLKALVRQQLPEKYKEIFFDQSKNGYAGYIDGGASQEEFYKFIKPILEKMDGTEELLVKLNREDLLRKQRTFDNGSIPHQIHLGELHAILRRQEDFYPFLKDNREKIEKILTFRIPYYVGPLARGNSRFAWMTRKSEETITPWNFEEVVDKGASAQSFIERMTNFDKNLPNEKVLPKHSLLYEYFTVYNELTKVKYVTEGMRKPAFLSGEQKKAIVDLLFKTNRKVTVKQLKEDYFKKIECFDSVEISGVEDRFNASLGTYHDLLKIIKDKDFLDNEENEDILEDIVLTLTLFEDREMIEERLKTYAHLFDDKVMKQLKRRRYTGWGRLSRKLINGIRDKQSGKTILDFLKSDGFANRNFMQLIHDDSLTFKEDIQKAQVSGQGDSLHEHIANLAGSPAIKKGILQTVKVVDELVKVMGRHKPENIVIEMARENQTTQKGQKNSRERMKRIEEGIKELGSQILKEHPVENTQLQNEKLYLYYLQNGRDMYVDQELDINRLSDYDVDHIVPQSFLKDDSIDNKVLTRSDKNRGKSDNVPSEEVVKKMKNYWRQLLNAKLITQRKFDNLTKAERGGLSELDKAGFIKRQLVETRQITKHVAQILDSRMNTKYDENDKLIREVKVITLKSKLVSDFRKDFQFYKVREINNYHHAHDAYLNAVVGTALIKKYPKLESEFVYGDYKVYDVRKMIAKSEQEIGKATAKYFFYSNIMNFFKTEITLANGEIRKRPLIETNGETGEIVWDKGRDFATVRKVLSMPQVNIVKKTEVQTGGFSKESILPKRNSDKLIARKKDWDPKKYGGFDSPTVAYSVLVVAKVEKGKSKKLKSVKELLGITIMERSSFEKNPIDFLEAKGYKEVKKDLIIKLPKYSLFELENGRKRMLASAGELQKGNELALPSKYVNFLYLASHYEKLKGSPEDNEQKQLFVEQHKHYLDEIIEQISEFSKRVILADANLDKVLSAYNKHRDKPIREQAENIIHLFTLTNLGAPAAFKYFDTTIDRKRYTSTKEVLDATLIHQSITGLYETRIDLSQLGGDEGADKRTADGSEFESPKKKRKV

SEQ ID NO: 147 - protein, 1588 aa, Artificial Sequence
  Description of Artificial Sequence: Synthetic polypeptide
MSEVEFSHEYWMRHALTLAKRARDEREVPVGAVLVLNNRVIGEGWNRAIGLHDPTAHAEIMALRQGGLVMQNYRLIDATLYSTFEPCVMCAGAMIHSRIGRVVFGVRNAKTGAAGSLMDVLHYPGMNHRVEITEGILADECAALLCYFFRMPRRVFNAQKKAQSSTDSGGSSGGSSGSETPGTSESATPESSGGSSGGSDKKYSIGLAIGTNSVGWAVITDEYKVPSKKFKVLGNTDRHSIKKNLIGALLFDSGETAEATRLKRTARRRYTRRKNRICYLQEIFSNEMAKVDDSFFHRLEESFLVEEDKKHERHPIFGNIVDEVAYHEKYPTIYHLRKKLVDSTDKADLRLIYLALAHMIKFRGHFLIEGDLNPDNSDVDKLFIQLVQTYNQLFEENPINASGVDAKAILSARLSKSRRLENLIAQLPGEKKNGLFGNLIALSLGLTPNFKSNFDLAEDAKLQLSKDTYDDDLDNLLAQIGDQYADLFLAAKNLSDAILLSDILRVNTEITKAPLSASMIKRYDEHHQDLTLLKALVRQQLPEKYKEIFFDQSKNGYAGYIDGGASQEEFYKFIKPILEKMDGTEELLVKLNREDLLRKQRTFDNGSIPHQIHLGELHAILRRQEDFYPFLKDNREKIEKILTFRIPYYVGPLARGNSRFAWMTRKSEETITPWNFEEVVDKGASAQSFIERMTNFDKNLPNEKVLPKHSLLYEYFTVYNELTKVKYVTEGMRKPAFLSGEQKKAIVDLLFKTNRKVTVKQLKEDYFKKIECFDSVEISGVEDRFNASLGTYHDLLKIIKDKDFLDNEENEDILEDIVLTLTLFEDREMIEERLKTYAHLFDDKVMKQLKRRRYTGWGRLSRKLINGIRDKQSGKTILDFLKSDGFANRNFMQLIHDDSLTFKEDIQKAQVSGQGDSLHEHIANLAGSPAIKKGILQTVKVVDELVKVMGRHKPENIVIEMARENQTTQKGQKNSRERMKRIEEGIKELGSQILKEHPVENTQLQNEKLYLYYLQNGRDMYVDQELDINRLSDYDVDHIVPQSFLKDDSIDNKVLTRSDKNRGKSDNVPSEEVVKKMKNYWRQLLNAKLITQRKFDNLTKAERGGLSELDKAGFIKRQLVETRQITKHVAQILDSRMNTKYDENDKLIREVKVITLKSKLVSDFRKDFQFYKVREINNYHHAHDAYLNAVVGTALIKKYPKLESEFVYGDYKVYDVRKMIAKSEQEIGKATAKYFFYSNIMNFFKTEITLANGEIRKRPLIETNGETGEIVWDKGRDFATVRKVLSMPQVNIVKKTEVQTGGFSKESILPKRNSDKLIARKKDWDPKKYGGFDSPTVAYSVLVVAKVEKGKSKKLKSVKELLGITIMERSSFEKNPIDFLEAKGYKEVKKDLIIKLPKYSLFELENGRKRMLASAGELQKGNELALPSKYVNFLYLASHYEKLKGSPEDNEQKQLFVEQHKHYLDEIIEQISEFSKRVILADANLDKVLSAYNKHRDKPIREQAENIIHLFTLTNLGAPAAFKYFDTTIDRKRYTSTKEVLDATLIHQSITGLYETRIDLSQLGGDEGADKRTADGSEFESPKKKRKV

SEQ ID NO: 148 - protein, 1786 aa, Artificial Sequence
  Description of Artificial Sequence: Synthetic polypeptide
MSEVEFSHEYWMRHALTLAKRAWDEREVPVGAVLVHNNRVIGEGWNRPIGRHDPTAHAEIMALRQGGLVMQNYRLIDATLYVTLEPCVMCAGAMIHSRIGRVVFGARDAKTGAAGSLMDVLHHPGMNHRVEITEGILADECAALLSDFFRMRRQEIKAQKKAQSSTDSGGSSGGSSGSETPGTSESATPESSGGSSGGSSEVEFSHEYWMRHALTLAKRARDEREVPVGAVLVLNNRVIGEGWNRAIGLHDPTAHAEIMALRQGGLVMQNYRLIDATLYSTFEPCVMCAGAMIHSRIGRVVFGVRNAKTGAAGSLMDVLHYPGMNHRVEITEGILADECAALLCYFFRMPRRVFNAQKKAQSSTDSGGSSGGSSGSETPGTSESATPESSGGSSGGSDKKYSIGLAIGTNSVGWAVITDEYKVPSKKFKVLGNTDRHSIKKNLIGALLFDSGETAEATRLKRTARRRYTRRKNRICYLQEIFSNEMAKVDDSFFHRLEESFLVEEDKKHERHPIFGNIVDEVAYHEKYPTIYHLRKKLVDSTDKADLRLIYLALAHMIKFRGHFLIEGDLNPDNSDVDKLFIQLVQTYNQLFEENPINASGVDAKAILSARLSKSRRLENLIAQLPGEKKNGLFGNLIALSLGLTPNFKSNFDLAEDAKLQLSKDTYDDDLDNLLAQIGDQYADLFLAAKNLSDAILLSDILRVNTEITKAPLSASMIKRYDEHHQDLTLLKALVRQQLPEKYKEIFFDQSKNGYAGYIDGGASQEEFYKFIKPILEKMDGTEELLVKLNREDLLRKQRTFDNGSIPHQIHLGELHAILRRQEDFYPFLKDNREKIEKILTFRIPYYVGPLARGNSRFAWMTRKSEETITPWNFEEVVDKGASAQSFIERMTNFDKNLPNEKVLPKHSLLYEYFTVYNELTKVKYVTEGMRKPAFLSGEQKKAIVDLLFKTNRKVTVKQLKEDYFKKIECFDSVEISGVEDRFNASLGTYHDLLKIIKDKDFLDNEENEDILEDIVLTLTLFEDREMIEERLKTYAHLFDDKVMKQLKRRRYTGWGRLSRKLINGIRDKQSGKTILDFLKSDGFANRNFMQLIHDDSLTFKEDIQKAQVSGQGDSLHEHIANLAGSPAIKKGILQTVKVVDELVKVMGRHKPENIVIEMARENQTTQKGQKNSRERMKRIEEGIKELGSQILKEHPVENTQLQNEKLYLYYLQNGRDMYVDQELDINRLSDYDVDHIVPQSFLKDDSIDNKVLTRSDKNRGKSDNVPSEEVVKKMKNYWRQLLNAKLITQRKFDNLTKAERGGLSELDKAGFIKRQLVETRQITKHVAQILDSRMNTKYDENDKLIREVKVITLKSKLVSDFRKDFQFYKVREINNYHHAHDAYLNAVVGTALIKKYPKLESEFVYGDYKVYDVRKMIAKSEQEIGKATAKYFFYSNIMNFFKTEITLANGEIRKRPLIETNGETGEIVWDKGRDFATVRKVLSMPQVNIVKKTEVQTGGFSKESILPKRNSDKLIARKKDWDPKKYGGFDSPTVAYSVLVVAKVEKGKSKKLKSVKELLGITIMERSSFEKNPIDFLEAKGYKEVKKDLIIKLPKYSLFELENGRKRMLASAGELQKGNELALPSKYVNFLYLASHYEKLKGSPEDNEQKQLFVEQHKHYLDEIIEQISEFSKRVILADANLDKVLSAYNKHRDKPIREQAENIIHLFTLTNLGAPAAFKYFDTTIDRKRYTSTKEVLDATLIHQSITGLYETRIDLSQLGGDEGADKRTADGSEFESPKKKRKV

SEQ ID NO: 149 - protein, 1588 aa, Artificial Sequence
  Description of Artificial Sequence: Synthetic polypeptide
MSEVEFSHEYWMRHALTLAKRARDEREVPVGAVLVLNNRVIGEGWNRAIGLHDPTAHAEIMALRQGGLVMQNYRLYDATLYSTFEPCVMCAGAMIHSRIGRVVFGVRNAKTGAAGSLMDVLHHPGMNHRVEITEGILADECAALLCRFFRMPRRVFNAQKKAQSSTDSGGSSGGSSGSETPGTSESATPESSGGSSGGSDKKYSIGLAIGTNSVGWAVITDEYKVPSKKFKVLGNTDRHSIKKNLIGALLFDSGETAEATRLKRTARRRYTRRKNRICYLQEIFSNEMAKVDDSFFHRLEESFLVEEDKKHERHPIFGNIVDEVAYHEKYPTIYHLRKKLVDSTDKADLRLIYLALAHMIKFRGHFLIEGDLNPDNSDVDKLFIQLVQTYNQLFEENPINASGVDAKAILSARLSKSRRLENLIAQLPGEKKNGLFGNLIALSLGLTPNFKSNFDLAEDAKLQLSKDTYDDDLDNLLAQIGDQYADLFLAAKNLSDAILLSDILRVNTEITKAPLSASMIKRYDEHHQDLTLLKALVRQQLPEKYKEIFFDQSKNGYAGYIDGGASQEEFYKFIKPILEKMDGTEELLVKLNREDLLRKQRTFDNGSIPHQIHLGELHAILRRQEDFYPFLKDNREKIEKILTFRIPYYVGPLARGNSRFAWMTRKSEETITPWNFEEVVDKGASAQSFIERMTNFDKNLPNEKVLPKHSLLYEYFTVYNELTKVKYVTEGMRKPAFLSGEQKKAIVDLLFKTNRKVTVKQLKEDYFKKIECFDSVEISGVEDRFNASLGTYHDLLKIIKDKDFLDNEENEDILEDIVLTLTLFEDREMIEERLKTYAHLFDDKVMKQLKRRRYTGWGRLSRKLINGIRDKQSGKTILDFLKSDGFANRNFMQLIHDDSLTFKEDIQKAQVSGQGDSLHEHIANLAGSPAIKKGILQTVKVVDELVKVMGRHKPENIVIEMARENQTTQKGQKNSRERMKRIEEGIKELGSQILKEHPVENTQLQNEKLYLYYLQNGRDMYVDQELDINRLSDYDVDHIVPQSFLKDDSIDNKVLTRSDKNRGKSDNVPSEEVVKKMKNYWRQLLNAKLITQRKFDNLTKAERGGLSELDKAGFIKRQLVETRQITKHVAQILDSRMNTKYDENDKLIREVKVITLKSKLVSDFRKDFQFYKVREINNYHHAHDAYLNAVVGTALIKKYPKLESEFVYGDYKVYDVRKMIAKSEQEIGKATAKYFFYSNIMNFFKTEITLANGEIRKRPLIETNGETGEIVWDKGRDFATVRKVLSMPQVNIVKKTEVQTGGFSKESILPKRNSDKLIARKKDWDPKKYGGFDSPTVAYSVLVVAKVEKGKSKKLKSVKELLGITIMERSSFEKNPIDFLEAKGYKEVKKDLIIKLPKYSLFELENGRKRMLASAGELQKGNELALPSKYVNFLYLASHYEKLKGSPEDNEQKQLFVEQHKHYLDEIIEQISEFSKRVILADANLDKVLSAYNKHRDKPIREQAENIIHLFTLTNLGAPAAFKYFDTTIDRKRYTSTKEVLDATLIHQSITGLYETRIDLSQLGGDEGADKRTADGSEFESPKKKRKV

SEQ ID NO: 150 - protein, 1786 aa, Artificial Sequence
  Description of Artificial Sequence: Synthetic polypeptide
MSEVEFSHEYWMRHALTLAKRAWDEREVPVGAVLVHNNRVIGEGWNRPIGRHDPTAHAEIMALRQGGLVMQNYRLIDATLYVTLEPCVMCAGAMIHSRIGRVVFGARDAKTGAAGSLMDVLHHPGMNHRVEITEGILADECAALLSDFFRMRRQEIKAQKKAQSSTDSGGSSGGSSGSETPGTSESATPESSGGSSGGSSEVEFSHEYWMRHALTLAKRARDEREVPVGAVLVLNNRVIGEGWNRAIGLHDPTAHAEIMALRQGGLVMQNYRLYDATLYSTFEPCVMCAGAMIHSRIGRVVFGVRNAKTGAAGSLMDVLHHPGMNHRVEITEGILADECAALLCRFFRMPRRVFNAQKKAQSSTDSGGSSGGSSGSETPGTSESATPESSGGSSGGSDKKYSIGLAIGTNSVGWAVITDEYKVPSKKFKVLGNTDRHSIKKNLIGALLFDSGETAEATRLKRTARRRYTRRKNRICYLQEIFSNEMAKVDDSFFHRLEESFLVEEDKKHERHPIFGNIVDEVAYHEKYPTIYHLRKKLVDSTDKADLRLIYLALAHMIKFRGHFLIEGDLNPDNSDVDKLFIQLVQTYNQLFEENPINASGVDAKAILSARLSKSRRLENLIAQLPGEKKNGLFGNLIALSLGLTPNFKSNFDLAEDAKLQLSKDTYDDDLDNLLAQIGDQYADLFLAAKNLSDAILLSDILRVNTEITKAPLSASMIKRYDEHHQDLTLLKALVRQQLPEKYKEIFFDQSKNGYAGYIDGGASQEEFYKFIKPILEKMDGTEELLVKLNREDLLRKQRTFDNGSIPHQIHLGELHAILRRQEDFYPFLKDNREKIEKILTFRIPYYVGPLARGNSRFAWMTRKSEETITPWNFEEVVDKGASAQSFIERMTNFDKNLPNEKVLPKHSLLYEYFTVYNELTKVKYVTEGMRKPAFLSGEQKKAIVDLLFKTNRKVTVKQLKEDYFKKIECFDSVEISGVEDRFNASLGTYHDLLKIIKDKDFLDNEENEDILEDIVLTLTLFEDREMIEERLKTYAHLFDDKVMKQLKRRRYTGWGRLSRKLINGIRDKQSGKTILDFLKSDGFANRNFMQLIHDDSLTFKEDIQKAQVSGQGDSLHEHIANLAGSPAIKKGILQTVKVVDELVKVMGRHKPENIVIEMARENQTTQKGQKNSRERMKRIEEGIKELGSQILKEHPVENTQLQNEKLYLYYLQNGRDMYVDQELDINRLSDYDVDHIVPQSFLKDDSIDNKVLTRSDKNRGKSDNVPSEEVVKKMKNYWRQLLNAKLITQRKFDNLTKAERGGLSELDKAGFIKRQLVETRQITKHVAQILDSRMNTKYDENDKLIREVKVITLKSKLVSDFRKDFQFYKVREINNYHHAHDAYLNAVVGTALIKKYPKLESEFVYGDYKVYDVRKMIAKSEQEIGKATAKYFFYSNIMNFFKTEITLANGEIRKRPLIETNGETGEIVWDKGRDFATVRKVLSMPQVNIVKKTEVQTGGFSKESILPKRNSDKLIARKKDWDPKKYGGFDSPTVAYSVLVVAKVEKGKSKKLKSVKELLGITIMERSSFEKNPIDFLEAKGYKEVKKDLIIKLPKYSLFELENGRKRMLASAGELQKGNELALPSKYVNFLYLASHYEKLKGSPEDNEQKQLFVEQHKHYLDEIIEQISEFSKRVILADANLDKVLSAYNKHRDKPIREQAENIIHLFTLTNLGAPAAFKYFDTTIDRKRYTSTKEVLDATLIHQSITGLYETRIDLSQLGGDEGADKRTADGSEFESPKKKRKV

SEQ ID NO: 151 - protein, 1588 aa, Artificial Sequence
  Description of Artificial Sequence: Synthetic polypeptide
MSEVEFSHEYWMRHALTLAKRARDEREVPVGAVLVLNNRVIGEGWNRAIGLHDPTAHAEIMALRQGGLVMQNYRLIDATLYVTFEPCVMCAGAMIHSRIGRVVFGVRNAKTGAAGSLMDVLHYPGMNHRVEITEGILADECAALLCTFFRMPRQVFNAQKKAQSSTDSGGSSGGSSGSETPGTSESATPESSGGSSGGSDKKYSIGLAIGTNSVGWAVITDEYKVPSKKFKVLGNTDRHSIKKNLIGALLFDSGETAEATRLKRTARRRYTRRKNRICYLQEIFSNEMAKVDDSFFHRLEESFLVEEDKKHERHPIFGNIVDEVAYHEKYPTIYHLRKKLVDSTDKADLRLIYLALAHMIKFRGHFLIEGDLNPDNSDVDKLFIQLVQTYNQLFEENPINASGVDAKAILSARLSKSRRLENLIAQLPGEKKNGLFGNLIALSLGLTPNFKSNFDLAEDAKLQLSKDTYDDDLDNLLAQIGDQYADLFLAAKNLSDAILLSDILRVNTEITKAPLSASMIKRYDEHHQDLTLLKALVRQQLPEKYKEIFFDQSKNGYAGYIDGGASQEEFYKFIKPILEKMDGTEELLVKLNREDLLRKQRTFDNGSIPHQIHLGELHAILRRQEDFYPFLKDNREKIEKILTFRIPYYVGPLARGNSRFAWMTRKSEETITPWNFEEVVDKGASAQSFIERMTNFDKNLPNEKVLPKHSLLYEYFTVYNELTKVKYVTEGMRKPAFLSGEQKKAIVDLLFKTNRKVTVKQLKEDYFKKIECFDSVEISGVEDRFNASLGTYHDLLKIIKDKDFLDNEENEDILEDIVLTLTLFEDREMIEERLKTYAHLFDDKVMKQLKRRRYTGWGRLSRKLINGIRDKQSGKTILDFLKSDGFANRNFMQLIHDDSLTFKEDIQKAQVSGQGDSLHEHIANLAGSPAIKKGILQTVKVVDELVKVMGRHKPENIVIEMARENQTTQKGQKNSRERMKRIEEGIKELGSQILKEHPVENTQLQNEKLYLYYLQNGRDMYVDQELDINRLSDYDVDHIVPQSFLKDDSIDNKVLTRSDKNRGKSDNVPSEEVVKKMKNYWRQLLNAKLITQRKFDNLTKAERGGLSELDKAGFIKRQLVETRQITKHVAQILDSRMNTKYDENDKLIREVKVITLKSKLVSDFRKDFQFYKVREINNYHHAHDAYLNAVVGTALIKKYPKLESEFVYGDYKVYDVRKMIAKSEQEIGKATAKYFFYSNIMNFFKTEITLANGEIRKRPLIETNGETGEIVWDKGRDFATVRKVLSMPQVNIVKKTEVQTGGFSKESILPKRNSDKLIARKKDWDPKKYGGFVSPTVAYSVLVVAKVEKGKSKKLKSVKELLGITIMERSSFEKNPIDFLEAKGYKEVKKDLIIKLPKYSLFELENGRKRMLASARELQKGNELALPSKYVNFLYLASHYEKLKGSPEDNEQKQLFVEQHKHYLDEIIEQISEFSKRVILADANLDKVLSAYNKHRDKPIREQAENIIHLFTLTNLGAPAAFKYFDTTIDRKQYRSTKEVLDATLIHQSITGLYETRIDLSQLGGDEGADKRTADGSEFESPKKKRKV

SEQ ID NO: 152 - protein, 1588 aa, Artificial Sequence
  Description of Artificial Sequence: Synthetic polypeptide
MSEVEFSHEYWMRHALTLAKRARDEREVPVGAVLVLNNRVIGEGWNRAIGLHDPTAHAEIMALRQGGLVMQNYRLIDATLYVTFEPCVMCAGAMIHSRIGRVVFGVRNAKTGAAGSLMDVLHYPGMNHRVEITEGILADECAALLCRFFRMPRQVFNAQKKAQSSTDSGGSSGGSSGSETPGTSESATPESSGGSSGGSDKKYSIGLAIGTNSVGWAVITDEYKVPSKKFKVLGNTDRHSIKKNLIGALLFDSGETAEATRLKRTARRRYTRRKNRICYLQEIFSNEMAKVDDSFFHRLEESFLVEEDKKHERHPIFGNIVDEVAYHEKYPTIYHLRKKLVDSTDKADLRLIYLALAHMIKFRGHFLIEGDLNPDNSDVDKLFIQLVQTYNQLFEENPINASGVDAKAILSARLSKSRRLENLIAQLPGEKKNGLFGNLIALSLGLTPNFKSNFDLAEDAKLQLSKDTYDDDLDNLLAQIGDQYADLFLAAKNLSDAILLSDILRVNTEITKAPLSASMIKRYDEHHQDLTLLKALVRQQLPEKYKEIFFDQSKNGYAGYIDGGASQEEFYKFIKPILEKMDGTEELLVKLNREDLLRKQRTFDNGSIPHQIHLGELHAILRRQEDFYPFLKDNREKIEKILTFRIPYYVGPLARGNSRFAWMTRKSEETITPWNFEEVVDKGASAQSFIERMTNFDKNLPNEKVLPKHSLLYEYFTVYNELTKVKYVTEGMRKPAFLSGEQKKAIVDLLFKTNRKVTVKQLKEDYFKKIECFDSVEISGVEDRFNASLGTYHDLLKIIKDKDFLDNEENEDILEDIVLTLTLFEDREMIEERLKTYAHLFDDKVMKQLKRRRYTGWGRLSRKLINGIRDKQSGKTILDFLKSDGFANRNFMQLIHDDSLTFKEDIQKAQVSGQGDSLHEHIANLAGSPAIKKGILQTVKVVDELVKVMGRHKPENIVIEMARENQTTQKGQKNSRERMKRIEEGIKELGSQILKEHPVENTQLQNEKLYLYYLQNGRDMYVDQELDINRLSDYDVDHIVPQSFLKDDSIDNKVLTRSDKNRGKSDNVPSEEVVKKMKNYWRQLLNAKLITQRKFDNLTKAERGGLSELDKAGFIKRQLVETRQITKHVAQILDSRMNTKYDENDKLIREVKVITLKSKLVSDFRKDFQFYKVREINNYHHAHDAYLNAVVGTALIKKYPKLESEFVYGDYKVYDVRKMIAKSEQEIGKATAKYFFYSNIMNFFKTEITLANGEIRKRPLIETNGETGEIVWDKGRDFATVRKVLSMPQVNIVKKTEVQTGGFSKESILPKRNSDKLIARKKDWDPKKYGGFVSPTVAYSVLVVAKVEKGKSKKLKSVKELLGITIMERSSFEKNPIDFLEAKGYKEVKKDLIIKLPKYSLFELENGRKRMLASARELQKGNELALPSKYVNFLYLASHYEKLKGSPEDNEQKQLFVEQHKHYLDEIIEQISEFSKRVILADANLDKVLSAYNKHRDKPIREQAENIIHLFTLTNLGAPAAFKYFDTTIDRKQYRSTKEVLDATLIHQSITGLYETRIDLSQLGGDEGADKRTADGSEFESPKKKRKV

SEQ ID NO: 153 - protein, 1588 aa, Artificial Sequence
  Description of Artificial Sequence: Synthetic polypeptide
MSEVEFSHEYWMRHALTLAKRARDEREVPVGAVLVLNNRVIGEGWNRAIGLHDPTAHAEIMALRQGGLVMQNYRLIDATLYVTFEPCVMCAGAMIHSRIGRVVFGVRNAKTGAAGSLMDVLHYPGMNHRVEITEGILADECAALLCYFFRMPRSVFNAQKKAQSSTDSGGSSGGSSGSETPGTSESATPESSGGSSGGSDKKYSIGLAIGTNSVGWAVITDEYKVPSKKFKVLGNTDRHSIKKNLIGALLFDSGETAEATRLKRTARRRYTRRKNRICYLQEIFSNEMAKVDDSFFHRLEESFLVEEDKKHERHPIFGNIVDEVAYHEKYPTIYHLRKKLVDSTDKADLRLIYLALAHMIKFRGHFLIEGDLNPDNSDVDKLFIQLVQTYNQLFEENPINASGVDAKAILSARLSKSRRLENLIAQLPGEKKNGLFGNLIALSLGLTPNFKSNFDLAEDAKLQLSKDTYDDDLDNLLAQIGDQYADLFLAAKNLSDAILLSDILRVNTEITKAPLSASMIKRYDEHHQDLTLLKALVRQQLPEKYKEIFFDQSKNGYAGYIDGGASQEEFYKFIKPILEKMDGTEELLVKLNREDLLRKQRTFDNGSIPHQIHLGELHAILRRQEDFYPFLKDNREKIEKILTFRIPYYVGPLARGNSRFAWMTRKSEETITPWNFEEVVDKGASAQSFIERMTNFDKNLPNEKVLPKHSLLYEYFTVYNELTKVKYVTEGMRKPAFLSGEQKKAIVDLLFKTNRKVTVKQLKEDYFKKIECFDSVEISGVEDRFNASLGTYHDLLKIIKDKDFLDNEENEDILEDIVLTLTLFEDREMIEERLKTYAHLFDDKVMKQLKRRRYTGWGRLSRKLINGIRDKQSGKTILDFLKSDGFANRNFMQLIHDDSLTFKEDIQKAQVSGQGDSLHEHIANLAGSPAIKKGILQTVKVVDELVKVMGRHKPENIVIEMARENQTTQKGQKNSRERMKRIEEGIKELGSQILKEHPVENTQLQNEKLYLYYLQNGRDMYVDQELDINRLSDYDVDHIVPQSFLKDDSIDNKVLTRSDKNRGKSDNVPSEEVVKKMKNYWRQLLNAKLITQRKFDNLTKAERGGLSELDKAGFIKRQLVETRQITKHVAQILDSRMNTKYDENDKLIREVKVITLKSKLVSDFRKDFQFYKVREINNYHHAHDAYLNAVVGTALIKKYPKLESEFVYGDYKVYDVRKMIAKSEQEIGKATAKYFFYSNIMNFFKTEITLANGEIRKRPLIETNGETGEIVWDKGRDFATVRKVLSMPQVNIVKKTEVQTGGFSKESILPKRNSDKLIARKKDWDPKKYGGFVSPTVAYSVLVVAKVEKGKSKKLKSVKELLGITIMERSSFEKNPIDFLEAKGYKEVKKDLIIKLPKYSLFELENGRKRMLASARELQKGNELALPSKYVNFLYLASHYEKLKGSPEDNEQKQLFVEQHKHYLDEIIEQISEFSKRVILADANLDKVLSAYNKHRDKPIREQAENIIHLFTLTNLGAPAAFKYFDTTIDRKQYRSTKEVLDATLIHQSITGLYETRIDLSQLGGDEGADKRTADGSEFESPKKKRKV

SEQ ID NO: 154 - protein, 1588 aa, Artificial Sequence
  Description of Artificial Sequence: Synthetic polypeptide
MSEVEFSHEYWMRHALTLAKRARDEREVPVGAVLVLNNRVIGEGWNRAIGLHDPTAHAEIMALRQGGLVMQNYRLIDATLYVTFEPCVMCAGAMIHSRIGRVVFGVRNAKTGAAGSLMDVLHHPGMNHRVEITEGILADECAALLCYFFRMPRQVFNAQKKAQSSTDSGGSSGGSSGSETPGTSESATPESSGGSSGGSDKKYSIGLAIGTNSVGWAVITDEYKVPSKKFKVLGNTDRHSIKKNLIGALLFDSGETAEATRLKRTARRRYTRRKNRICYLQEIFSNEMAKVDDSFFHRLEESFLVEEDKKHERHPIFGNIVDEVAYHEKYPTIYHLRKKLVDSTDKADLRLIYLALAHMIKFRGHFLIEGDLNPDNSDVDKLFIQLVQTYNQLFEENPINASGVDAKAILSARLSKSRRLENLIAQLPGEKKNGLFGNLIALSLGLTPNFKSNFDLAEDAKLQLSKDTYDDDLDNLLAQIGDQYADLFLAAKNLSDAILLSDILRVNTEITKAPLSASMIKRYDEHHQDLTLLKALVRQQLPEKYKEIFFDQSKNGYAGYIDGGASQEEFYKFIKPILEKMDGTEELLVKLNREDLLRKQRTFDNGSIPHQIHLGELHAILRRQEDFYPFLKDNREKIEKILTFRIPYYVGPLARGNSRFAWMTRKSEETITPWNFEEVVDKGASAQSFIERMTNFDKNLPNEKVLPKHSLLYEYFTVYNELTKVKYVTEGMRKPAFLSGEQKKAIVDLLFKTNRKVTVKQLKEDYFKKIECFDSVEISGVEDRFNASLGTYHDLLKIIKDKDFLDNEENEDILEDIVLTLTLFEDREMIEERLKTYAHLFDDKVMKQLKRRRYTGWGRLSRKLINGIRDKQSGKTILDFLKSDGFANRNFMQLIHDDSLTFKEDIQKAQVSGQGDSLHEHIANLAGSPAIKKGILQTVKVVDELVKVMGRHKPENIVIEMARENQTTQKGQKNSRERMKRIEEGIKELGSQILKEHPVENTQLQNEKLYLYYLQNGRDMYVDQELDINRLSDYDVDHIVPQSFLKDDSIDNKVLTRSDKNRGKSDNVPSEEVVKKMKNYWRQLLNAKLITQRKFDNLTKAERGGLSELDKAGFIKRQLVETRQITKHVAQILDSRMNTKYDENDKLIREVKVITLKSKLVSDFRKDFQFYKVREINNYHHAHDAYLNAVVGTALIKKYPKLESEFVYGDYKVYDVRKMIAKSEQEIGKATAKYFFYSNIMNFFKTEITLANGEIRKRPLIETNGETGEIVWDKGRDFATVRKVLSMPQVNIVKKTEVQTGGFSKESILPKRNSDKLIARKKDWDPKKYGGFVSPTVAYSVLVVAKVEKGKSKKLKSVKELLGITIMERSSFEKNPIDFLEAKGYKEVKKDLIIKLPKYSLFELENGRKRMLASARELQKGNELALPSKYVNFLYLASHYEKLKGSPEDNEQKQLFVEQHKHYLDEIIEQISEFSKRVILADANLDKVLSAYNKHRDKPIREQAENIIHLFTLTNLGAPAAFKYFDTTIDRKQYRSTKEVLDATLIHQSITGLYETRIDLSQLGGDEGADKRTADGSEFESPKKKRKV

SEQ ID NO: 155 - protein, 1588 aa, Artificial Sequence
  Description of Artificial Sequence: Synthetic polypeptide
MSEVEFSHEYWMRHALTLAKRARDEREVPVGAVLVLNNRVIGEGWNRAIGLHDPTAHAEIMALRQGGLVMQNYRLIDATLYSTFEPCVMCAGAMIHSRIGRVVFGVRNAKTGAAGSLMDVLHYPGMNHRVEITEGILADECAALLCYFFRMPRQVFNAQKKAQSSTDSGGSSGGSSGSETPGTSESATPESSGGSSGGSDKKYSIGLAIGTNSVGWAVITDEYKVPSKKFKVLGNTDRHSIKKNLIGALLFDSGETAEATRLKRTARRRYTRRKNRICYLQEIFSNEMAKVDDSFFHRLEESFLVEEDKKHERHPIFGNIVDEVAYHEKYPTIYHLRKKLVDSTDKADLRLIYLALAHMIKFRGHFLIEGDLNPDNSDVDKLFIQLVQTYNQLFEENPINASGVDAKAILSARLSKSRRLENLIAQLPGEKKNGLFGNLIALSLGLTPNFKSNFDLAEDAKLQLSKDTYDDDLDNLLAQIGDQYADLFLAAKNLSDAILLSDILRVNTEITKAPLSASMIKRYDEHHQDLTLLKALVRQQLPEKYKEIFFDQSKNGYAGYIDGGASQEEFYKFIKPILEKMDGTEELLVKLNREDLLRKQRTFDNGSIPHQIHLGELHAILRRQEDFYPFLKDNREKIEKILTFRIPYYVGPLARGNSRFAWMTRKSEETITPWNFEEVVDKGASAQSFIERMTNFDKNLPNEKVLPKHSLLYEYFTVYNELTKVKYVTEGMRKPAFLSGEQKKAIVDLLFKTNRKVTVKQLKEDYFKKIECFDSVEISGVEDRFNASLGTYHDLLKIIKDKDFLDNEENEDILEDIVLTLTLFEDREMIEERLKTYAHLFDDKVMKQLKRRRYTGWGRLSRKLINGIRDKQSGKTILDFLKSDGFANRNFMQLIHDDSLTFKEDIQKAQVSGQGDSLHEHIANLAGSPAIKKGILQTVKVVDELVKVMGRHKPENIVIEMARENQTTQKGQKNSRERMKRIEEGIKELGSQILKEHPVENTQLQNEKLYLYYLQNGRDMYVDQELDINRLSDYDVDHIVPQSFLKDDSIDNKVLTRSDKNRGKSDNVPSEEVVKKMKNYWRQLLNAKLITQRKFDNLTKAERGGLSELDKAGFIKRQLVETRQITKHVAQILDSRMNTKYDENDKLIREVKVITLKSKLVSDFRKDFQFYKVREINNYHHAHDAYLNAVVGTALIKKYPKLESEFVYGDYKVYDVRKMIAKSEQEIGKATAKYFFYSNIMNFFKTEITLANGEIRKRPLIETNGETGEIVWDKGRDFATVRKVLSMPQVNIVKKTEVQTGGFSKESILPKRNSDKLIARKKDWDPKKYGGFVSPTVAYSVLVVAKVEKGKSKKLKSVKELLGITIMERSSFEKNPIDFLEAKGYKEVKKDLIIKLPKYSLFELENGRKRMLASARELQKGNELALPSKYVNFLYLASHYEKLKGSPEDNEQKQLFVEQHKHYLDEIIEQISEFSKRVILADANLDKVLSAYNKHRDKPIREQAENIIHLFTLTNLGAPAAFKYFDTTIDRKQYRSTKEVLDATLIHQSITGLYETRIDLSQLGGDEGADKRTADGSEFESPKKKRKV

SEQ ID NO: 156 - protein, 1588 aa, Artificial Sequence
  Description of Artificial Sequence: Synthetic polypeptide
MSEVEFSHEYWMRHALTLAKRARDEREVPVGAVLVLNNRVIGEGWNRAIGLHDPTAHAEIMALRQGGLVMQNYRLIDATLYVTFEPCVMCAGAMIHSRIGRVVFGVRNAKTGAAGSLMDVLHYPGMNHRVEITEGILADECAALLCYFFRMPRQVFNAQKKAQSSRDSGGSSGGSSGSETPGTSESATPESSGGSSGGSDKKYSIGLAIGTNSVGWAVITDEYKVPSKKFKVLGNTDRHSIKKNLIGALLFDSGETAEATRLKRTARRRYTRRKNRICYLQEIFSNEMAKVDDSFFHRLEESFLVEEDKKHERHPIFGNIVDEVAYHEKYPTIYHLRKKLVDSTDKADLRLIYLALAHMIKFRGHFLIEGDLNPDNSDVDKLFIQLVQTYNQLFEENPINASGVDAKAILSARLSKSRRLENLIAQLPGEKKNGLFGNLIALSLGLTPNFKSNFDLAEDAKLQLSKDTYDDDLDNLLAQIGDQYADLFLAAKNLSDAILLSDILRVNTEITKAPLSASMIKRYDEHHQDLTLLKALVRQQLPEKYKEIFFDQSKNGYAGYIDGGASQEEFYKFIKPILEKMDGTEELLVKLNREDLLRKQRTFDNGSIPHQIHLGELHAILRRQEDFYPFLKDNREKIEKILTFRIPYYVGPLARGNSRFAWMTRKSEETITPWNFEEVVDKGASAQSFIERMTNFDKNLPNEKVLPKHSLLYEYFTVYNELTKVKYVTEGMRKPAFLSGEQKKAIVDLLFKTNRKVTVKQLKEDYFKKIECFDSVEISGVEDRFNASLGTYHDLLKIIKDKDFLDNEENEDILEDIVLTLTLFEDREMIEERLKTYAHLFDDKVMKQLKRRRYTGWGRLSRKLINGIRDKQSGKTILDFLKSDGFANRNFMQLIHDDSLTFKEDIQKAQVSGQGDSLHEHIANLAGSPAIKKGILQTVKVVDELVKVMGRHKPENIVIEMARENQTTQKGQKNSRERMKRIEEGIKELGSQILKEHPVENTQLQNEKLYLYYLQNGRDMYVDQELDINRLSDYDVDHIVPQSFLKDDSIDNKVLTRSDKNRGKSDNVPSEEVVKKMKNYWRQLLNAKLITQRKFDNLTKAERGGLSELDKAGFIKRQLVETRQITKHVAQILDSRMNTKYDENDKLIREVKVITLKSKLVSDFRKDFQFYKVREINNYHHAHDAYLNAVVGTALIKKYPKLESEFVYGDYKVYDVRKMIAKSEQEIGKATAKYFFYSNIMNFFKTEITLANGEIRKRPLIETNGETGEIVWDKGRDFATVRKVLSMPQVNIVKKTEVQTGGFSKESILPKRNSDKLIARKKDWDPKKYGGFVSPTVAYSVLVVAKVEKGKSKKLKSVKELLGITIMERSSFEKNPIDFLEAKGYKEVKKDLIIKLPKYSLFELENGRKRMLASARELQKGNELALPSKYVNFLYLASHYEKLKGSPEDNEQKQLFVEQHKHYLDEIIEQISEFSKRVILADANLDKVLSAYNKHRDKPIREQAENIIHLFTLTNLGAPAAFKYFDTTIDRKQYRSTKEVLDATLIHQSITGLYETRIDLSQLGGDEGADKRTADGSEFESPKKKRKV

SEQ ID NO: 157 - protein, 1588 aa, Artificial Sequence
  Description of Artificial Sequence: Synthetic polypeptide
MSEVEFSHEYWMRHALTLAKRARDEREVPVGAVLVLNNRVIGEGWNRAIGLHDPTAHAEIMALRQGGLVMQNYRLIDATLYVTFEPCVMCAGAMIHSRIGRVVFGVRNAKTGAAGSLMDVLHYPGMNHRVEITEGILADECAALLCYFFRMPRRVFNAQKKAQSSTDSGGSSGGSSGSETPGTSESATPESSGGSSGGSDKKYSIGLAIGTNSVGWAVITDEYKVPSKKFKVLGNTDRHSIKKNLIGALLFDSGETAEATRLKRTARRRYTRRKNRICYLQEIFSNEMAKVDDSFFHRLEESFLVEEDKKHERHPIFGNIVDEVAYHEKYPTIYHLRKKLVDSTDKADLRLIYLALAHMIKFRGHFLIEGDLNPDNSDVDKLFIQLVQTYNQLFEENPINASGVDAKAILSARLSKSRRLENLIAQLPGEKKNGLFGNLIALSLGLTPNFKSNFDLAEDAKLQLSKDTYDDDLDNLLAQIGDQYADLFLAAKNLSDAILLSDILRVNTEITKAPLSASMIKRYDEHHQDLTLLKALVRQQLPEKYKEIFFDQSKNGYAGYIDGGASQEEFYKFIKPILEKMDGTEELLVKLNREDLLRKQRTFDNGSIPHQIHLGELHAILRRQEDFYPFLKDNREKIEKILTFRIPYYVGPLARGNSRFAWMTRKSEETITPWNFEEVVDKGASAQSFIERMTNFDKNLPNEKVLPKHSLLYEYFTVYNELTKVKYVTEGMRKPAFLSGEQKKAIVDLLFKTNRKVTVKQLKEDYFKKIECFDSVEISGVEDRFNASLGTYHDLLKIIKDKDFLDNEENEDILEDIVLTLTLFEDREMIEERLKTYAHLFDDKVMKQLKRRRYTGWGRLSRKLINGIRDKQSGKTILDFLKSDGFANRNFMQLIHDDSLTFKEDIQKAQVSGQGDSLHEHIANLAGSPAIKKGILQTVKVVDELVKVMGRHKPENIVIEMARENQTTQKGQKNSRERMKRIEEGIKELGSQILKEHPVENTQLQNEKLYLYYLQNGRDMYVDQELDINRLSDYDVDHIVPQSFLKDDSIDNKVLTRSDKNRGKSDNVPSEEVVKKMKNYWRQLLNAKLITQRKFDNLTKAERGGLSELDKAGFIKRQLVETRQITKHVAQILDSRMNTKYDENDKLIREVKVITLKSKLVSDFRKDFQFYKVREINNYHHAHDAYLNAVVGTALIKKYPKLESEFVYGDYKVYDVRKMIAKSEQEIGKATAKYFFYSNIMNFFKTEITLANGEIRKRPLIETNGETGEIVWDKGRDFATVRKVLSMPQVNIVKKTEVQTGGFSKESILPKRNSDKLIARKKDWDPKKYGGFVSPTVAYSVLVVAKVEKGKSKKLKSVKELLGITIMERSSFEKNPIDFLEAKGYKEVKKDLIIKLPKYSLFELENGRKRMLASARELQKGNELALPSKYVNFLYLASHYEKLKGSPEDNEQKQLFVEQHKHYLDEIIEQISEFSKRVILADANLDKVLSAYNKHRDKPIREQAENIIHLFTLTNLGAPAAFKYFDTTIDRKQYRSTKEVLDATLIHQSITGLYETRIDLSQLGGDEGADKRTADGSEFESPKKKRKV

SEQ ID NO: 158 - protein, 1588 aa, Artificial Sequence
  Description of Artificial Sequence: Synthetic polypeptide
MSEVEFSHEYWMRHALTLAKRARDEREVPVGAVLVLNNRVIGEGWNRAIGLHDPTAHAEIMALRQGGLVMQNYRLIDATLYVTFEPCVMCAGAMIHSRIGRVVFGVRNAKTGAAGSLMDVLHHPGMNHRVEITEGILADECAALLCRFFRMPRRVFNAQKKAQSSTDSGGSSGGSSGSETPGTSESATPESSGGSSGGSDKKYSIGLAIGTNSVGWAVITDEYKVPSKKFKVLGNTDRHSIKKNLIGALLFDSGETAEATRLKRTARRRYTRRKNRICYLQEIFSNEMAKVDDSFFHRLEESFLVEEDKKHERHPIFGNIVDEVAYHEKYPTIYHLRKKLVDSTDKADLRLIYLALAHMIKFRGHFLIEGDLNPDNSDVDKLFIQLVQTYNQLFEENPINASGVDAKAILSARLSKSRRLENLIAQLPGEKKNGLFGNLIALSLGLTPNFKSNFDLAEDAKLQLSKDTYDDDLDNLLAQIGDQYADLFLAAKNLSDAILLSDILRVNTEITKAPLSASMIKRYDEHHQDLTLLKALVRQQLPEKYKEIFFDQSKNGYAGYIDGGASQEEFYKFIKPILEKMDGTEELLVKLNREDLLRKQRTFDNGSIPHQIHLGELHAILRRQEDFYPFLKDNREKIEKILTFRIPYYVGPLARGNSRFAWMTRKSEETITPWNFEEVVDKGASAQSFIERMTNFDKNLPNEKVLPKHSLLYEYFTVYNELTKVKYVTEGMRKPAFLSGEQKKAIVDLLFKTNRKVTVKQLKEDYFKKIECFDSVEISGVEDRFNASLGTYHDLLKIIKDKDFLDNEENEDILEDIVLTLTLFEDREMIEERLKTYAHLFDDKVMKQLKRRRYTGWGRLSRKLINGIRDKQSGKTILDFLKSDGFANRNFMQLIHDDSLTFKEDIQKAQVSGQGDSLHEHIANLAGSPAIKKGILQTVKVVDELVKVMGRHKPENIVIEMARENQTTQKGQKNSRERMKRIEEGIKELGSQILKEHPVENTQLQNEKLYLYYLQNGRDMYVDQELDINRLSDYDVDHIVPQSFLKDDSIDNKVLTRSDKNRGKSDNVPSEEVVKKMKNYWRQLLNAKLITQRKFDNLTKAERGGLSELDKAGFIKRQLVETRQITKHVAQILDSRMNTKYDENDKLIREVKVITLKSKLVSDFRKDFQFYKVREINNYHHAHDAYLNAVVGTALIKKYPKLESEFVYGDYKVYDVRKMIAKSEQEIGKATAKYFFYSNIMNFFKTEITLANGEIRKRPLIETNGETGEIVWDKGRDFATVRKVLSMPQVNIVKKTEVQTGGFSKESILPKRNSDKLIARKKDWDPKKYGGFVSPTVAYSVLVVAKVEKGKSKKLKSVKELLGITIMERSSFEKNPIDFLEAKGYKEVKKDLIIKLPKYSLFELENGRKRMLASARELQKGNELALPSKYVNFLYLASHYEKLKGSPEDNEQKQLFVEQHKHYLDEIIEQISEFSKRVILADANLDKVLSAYNKHRDKPIREQAENIIHLFTLTNLGAPAAFKYFDTTIDRKQYRSTKEVLDATLIHQSITGLYETRIDLSQLGGDEGADKRTADGSEFESPKKKRKV

SEQ ID NO: 159 - protein, 1588 aa, Artificial Sequence
  Description of Artificial Sequence: Synthetic polypeptide
MSEVEFSHEYWMRHALTLAKRARDEREVPVGAVLVLNNRVIGEGWNRAIGLHDPTAHAEIMALRQGGLVMQNYRLYDATLYVTFEPCVMCAGAMIHSRIGRVVFGVRNAKTGAAGSLMDVLHYPGMNHRVEITEGILADECAALLCRFFRMPRRVFNAQKKAQSSTDSGGSSGGSSGSETPGTSESATPESSGGSSGGSDKKYSIGLAIGTNSVGWAVITDEYKVPSKKFKVLGNTDRHSIKKNLIGALLFDSGETAEATRLKRTARRRYTRRKNRICYLQEIFSNEMAKVDDSFFHRLEESFLVEEDKKHERHPIFGNIVDEVAYHEKYPTIYHLRKKLVDSTDKADLRLIYLALAHMIKFRGHFLIEGDLNPDNSDVDKLFIQLVQTYNQLFEENPINASGVDAKAILSARLSKSRRLENLIAQLPGEKKNGLFGNLIALSLGLTPNFKSNFDLAEDAKLQLSKDTYDDDLDNLLAQIGDQYADLFLAAKNLSDAILLSDILRVNTEITKAPLSASMIKRYDEHHQDLTLLKALVRQQLPEKYKEIFFDQSKNGYAGYIDGGASQEEFYKFIKPILEKMDGTEELLVKLNREDLLRKQRTFDNGSIPHQIHLGELHAILRRQEDFYPFLKDNREKIEKILTFRIPYYVGPLARGNSRFAWMTRKSEETITPWNFEEVVDKGASAQSFIERMTNFDKNLPNEKVLPKHSLLYEYFTVYNELTKVKYVTEGMRKPAFLSGEQKKAIVDLLFKTNRKVTVKQLKEDYFKKIECFDSVEISGVEDRFNASLGTYHDLLKIIKDKDFLDNEENEDILEDIVLTLTLFEDREMIEERLKTYAHLFDDKVMKQLKRRRYTGWGRLSRKLINGIRDKQSGKTILDFLKSDGFANRNFMQLIHDDSLTFKEDIQKAQVSGQGDSLHEHIANLAGSPAIKKGILQTVKVVDELVKVMGRHKPENIVIEMARENQTTQKGQKNSRERMKRIEEGIKELGSQILKEHPVENTQLQNEKLYLYYLQNGRDMYVDQELDINRLSDYDVDHIVPQSFLKDDSIDNKVLTRSDKNRGKSDNVPSEEVVKKMKNYWRQLLNAKLITQRKFDNLTKAERGGLSELDKAGFIKRQLVETRQITKHVAQILDSRMNTKYDENDKLIREVKVITLKSKLVSDFRKDFQFYKVREINNYHHAHDAYLNAVVGTALIKKYPKLESEFVYGDYKVYDVRKMIAKSEQEIGKATAKYFFYSNIMNFFKTEITLANGEIRKRPLIETNGETGEIVWDKGRDFATVRKVLSMPQVNIVKKTEVQTGGFSKESILPKRNSDKLIARKKDWDPKKYGGFVSPTVAYSVLVVAKVEKGKSKKLKSVKELLGITIMERSSFEKNPIDFLEAKGYKEVKKDLIIKLPKYSLFELENGRKRMLASARELQKGNELALPSKYVNFLYLASHYEKLKGSPEDNEQKQLFVEQHKHYLDEIIEQISEFSKRVILADANLDKVLSAYNKHRDKPIREQAENIIHLFTLTNLGAPAAFKYFDTTIDRKQYRSTKEVLDATLIHQSITGLYETRIDLSQLGGDEGADKRTADGSEFESPKKKRKV

SEQ ID NO: 160 - protein, 1588 aa, Artificial Sequence
  Description of Artificial Sequence: Synthetic polypeptide
MSEVEFSHEYWMRHALTLAKRARDEREVPVGAVLVLNNRVIGEGWNRAIGLHDPTAHAEIMALRQGGLVMQNYRLIDATLYVTFEPCVMCAGAMIHSRIGRVVFGVRNAKTGAAGSLMDVLHYPGMNHRVEITEGILADECAALLCRFFRMPRRVFNAQKKAQSSRDSGGSSGGSSGSETPGTSESATPESSGGSSGGSDKKYSIGLAIGTNSVGWAVITDEYKVPSKKFKVLGNTDRHSIKKNLIGALLFDSGETAEATRLKRTARRRYTRRKNRICYLQEIFSNEMAKVDDSFFHRLEESFLVEEDKKHERHPIFGNIVDEVAYHEKYPTIYHLRKKLVDSTDKADLRLIYLALAHMIKFRGHFLIEGDLNPDNSDVDKLFIQLVQTYNQLFEENPINASGVDAKAILSARLSKSRRLENLIAQLPGEKKNGLFGNLIALSLGLTPNFKSNFDLAEDAKLQLSKDTYDDDLDNLLAQIGDQYADLFLAAKNLSDAILLSDILRVNTEITKAPLSASMIKRYDEHHQDLTLLKALVRQQLPEKYKEIFFDQSKNGYAGYIDGGASQEEFYKFIKPILEKMDGTEELLVKLNREDLLRKQRTFDNGSIPHQIHLGELHAILRRQEDFYPFLKDNREKIEKILTFRIPYYVGPLARGNSRFAWMTRKSEETITPWNFEEVVDKGASAQSFIERMTNFDKNLPNEKVLPKHSLLYEYFTVYNELTKVKYVTEGMRKPAFLSGEQKKAIVDLLFKTNRKVTVKQLKEDYFKKIECFDSVEISGVEDRFNASLGTYHDLLKIIKDKDFLDNEENEDILEDIVLTLTLFEDREMIEERLKTYAHLFDDKVMKQLKRRRYTGWGRLSRKLINGIRDKQSGKTILDFLKSDGFANRNFMQLIHDDSLTFKEDIQKAQVSGQGDSLHEHIANLAGSPAIKKGILQTVKVVDELVKVMGRHKPENIVIEMARENQTTQKGQKNSRERMKRIEEGIKELGSQILKEHPVENTQLQNEKLYLYYLQNGRDMYVDQELDINRLSDYDVDHIVPQSFLKDDSIDNKVLTRSDKNRGKSDNVPSEEVVKKMKNYWRQLLNAKLITQRKFDNLTKAERGGLSELDKAGFIKRQLVETRQITKHVAQILDSRMNTKYDENDKLIREVKVITLKSKLVSDFRKDFQFYKVREINNYHHAHDAYLNAVVGTALIKKYPKLESEFVYGDYKVYDVRKMIAKSEQEIGKATAKYFFYSNIMNFFKTEITLANGEIRKRPLIETNGETGEIVWDKGRDFATVRKVLSMPQVNIVKKTEVQTGGFSKESILPKRNSDKLIARKKDWDPKKYGGFVSPTVAYSVLVVAKVEKGKSKKLKSVKELLGITIMERSSFEKNPIDFLEAKGYKEVKKDLIIKLPKYSLFELENGRKRMLASARELQKGNELALPSKYVNFLYLASHYEKLKGSPEDNEQKQLFVEQHKHYLDEIIEQISEFSKRVILADANLDKVLSAYNKHRDKPIREQAENIIHLFTLTNLGAPAAFKYFDTTIDRKQYRSTKEVLDATLIHQSITGLYETRIDLSQLGGDEGADKRTADGSEFESPKKKRKV

SEQ ID NO: 161 - protein, 1588 aa, Artificial Sequence
  Description of Artificial Sequence: Synthetic polypeptide
MSEVEFSHEYWMRHALTLAKRARDEREVPVGAVLVLNNRVIGEGWNRAIGLHDPTAHAEIMALRQGGLVMQNYRLIDATLYVTFEPCVMCAGAMIHSRIGRVVFGVRNAKTGAAGSLMDVLHYPGMNHRVEITEGILADECAALLCTFFRMPRRVFNAQKKAQSSTDSGGSSGGSSGSETPGTSESATPESSGGSSGGSDKKYSIGLAIGTNSVGWAVITDEYKVPSKKFKVLGNTDRHSIKKNLIGALLFDSGETAEATRLKRTARRRYTRRKNRICYLQEIFSNEMAKVDDSFFHRLEESFLVEEDKKHERHPIFGNIVDEVAYHEKYPTIYHLRKKLVDSTDKADLRLIYLALAHMIKFRGHFLIEGDLNPDNSDVDKLFIQLVQTYNQLFEENPINASGVDAKAILSARLSKSRRLENLIAQLPGEKKNGLFGNLIALSLGLTPNFKSNFDLAEDAKLQLSKDTYDDDLDNLLAQIGDQYADLFLAAKNLSDAILLSDILRVNTEITKAPLSASMIKRYDEHHQDLTLLKALVRQQLPEKYKEIFFDQSKNGYAGYIDGGASQEEFYKFIKPILEKMDGTEELLVKLNREDLLRKQRTFDNGSIPHQIHLGELHAILRRQEDFYPFLKDNREKIEKILTFRIPYYVGPLARGNSRFAWMTRKSEETITPWNFEEVVDKGASAQSFIERMTNFDKNLPNEKVLPKHSLLYEYFTVYNELTKVKYVTEGMRKPAFLSGEQKKAIVDLLFKTNRKVTVKQLKEDYFKKIECFDSVEISGVEDRFNASLGTYHDLLKIIKDKDFLDNEENEDILEDIVLTLTLFEDREMIEERLKTYAHLFDDKVMKQLKRRRYTGWGRLSRKLINGIRDKQSGKTILDFLKSDGFANRNFMQLIHDDSLTFKEDIQKAQVSGQGDSLHEHIANLAGSPAIKKGILQTVKVVDELVKVMGRHKPENIVIEMARENQTTQKGQKNSRERMKRIEEGIKELGSQILKEHPVENTQLQNEKLYLYYLQNGRDMYVDQELDINRLSDYDVDHIVPQSFLKDDSIDNKVLTRSDKNRGKSDNVPSEEVVKKMKNYWRQLLNAKLITQRKFDNLTKAERGGLSELDKAGFIKRQLVETRQITKHVAQILDSRMNTKYDENDKLIREVKVITLKSKLVSDFRKDFQFYKVREINNYHHAHDAYLNAVVGTALIKKYPKLESEFVYGDYKVYDVRKMIAKSEQEIGKATAKYFFYSNIMNFFKTEITLANGEIRKRPLIETNGETGEIVWDKGRDFATVRKVLSMPQVNIVKKTEVQTGGFSKESILPKRNSDKLIARKKDWDPKKYGGFVSPTVAYSVLVVAKVEKGKSKKLKSVKELLGITIMERSSFEKNPIDFLEAKGYKEVKKDLIIKLPKYSLFELENGRKRMLASARELQKGNELALPSKYVNFLYLASHYEKLKGSPEDNEQKQLFVEQHKHYLDEIIEQISEFSKRVILADANLDKVLSAYNKHRDKPIREQAENIIHLFTLTNLGAPAAFKYFDTTIDRKQYRSTKEVLDATLIHQSITGLYETRIDLSQLGGDEGADKRTADGSEFESPKKKRKV

SEQ ID NO: 162 - protein, 1588 aa, Artificial Sequence
  Description of Artificial Sequence: Synthetic polypeptide
MSEVEFSHEYWMRHALTLAKRARDEREVPVGAVLVLNNRVIGEGWNRAIGLHDPTAHAEIMALRQGGLVMQNYRLIDATLYVTFEPCVMCAGAMIHSRIGRVVFGVRNAKTGAAGSLMDVLHYPGMNHRVEITEGILADECAALLCTFFRMPRSVFNAQKKAQSSTDSGGSSGGSSGSETPGTSESATPESSGGSSGGSDKKYSIGLAIGTNSVGWAVITDEYKVPSKKFKVLGNTDRHSIKKNLIGALLFDSGETAEATRLKRTARRRYTRRKNRICYLQEIFSNEMAKVDDSFFHRLEESFLVEEDKKHERHPIFGNIVDEVAYHEKYPTIYHLRKKLVDSTDKADLRLIYLALAHMIKFRGHFLIEGDLNPDNSDVDKLFIQLVQTYNQLFEENPINASGVDAKAILSARLSKSRRLENLIAQLPGEKKNGLFGNLIALSLGLTPNFKSNFDLAEDAKLQLSKDTYDDDLDNLLAQIGDQYADLFLAAKNLSDAILLSDILRVNTEITKAPLSASMIKRYDEHHQDLTLLKALVRQQLPEKYKEIFFDQSKNGYAGYIDGGASQEEFYKFIKPILEKMDGTEELLVKLNREDLLRKQRTFDNGSIPHQIHLGELHAILRRQEDFYPFLKDNREKIEKILTFRIPYYVGPLARGNSRFAWMTRKSEETITPWNFEEVVDKGASAQSFIERMTNFDKNLPNEKVLPKHSLLYEYFTVYNELTKVKYVTEGMRKPAFLSGEQKKAIVDLLFKTNRKVTVKQLKEDYFKKIECFDSVEISGVEDRFNASLGTYHDLLKIIKDKDFLDNEENEDILEDIVLTLTLFEDREMIEERLKTYAHLFDDKVMKQLKRRRYTGWGRLSRKLINGIRDKQSGKTILDFLKSDGFANRNFMQLIHDDSLTFKEDIQKAQVSGQGDSLHEHIANLAGSPAIKKGILQTVKVVDELVKVMGRHKPENIVIEMARENQTTQKGQKNSRERMKRIEEGIKELGSQILKEHPVENTQLQNEKLYLYYLQNGRDMYVDQELDINRLSDYDVDHIVPQSFLKDDSIDNKVLTRSDKNRGKSDNVPSEEVVKKMKNYWRQLLNAKLITQRKFDNLTKAERGGLSELDKAGFIKRQLVETRQITKHVAQILDSRMNTKYDENDKLIREVKVITLKSKLVSDFRKDFQFYKVREINNYHHAHDAYLNAVVGTALIKKYPKLESEFVYGDYKVYDVRKMIAKSEQEIGKATAKYFFYSNIMNFFKTEITLANGEIRKRPLIETNGETGEIVWDKGRDFATVRKVLSMPQVNIVKKTEVQTGGFSKESILPKRNSDKLIARKKDWDPKKYGGFVSPTVAYSVLVVAKVEKGKSKKLKSVKELLGITIMERSSFEKNPIDFLEAKGYKEVKKDLIIKLPKYSLFELENGRKRMLASARELQKGNELALPSKYVNFLYLASHYEKLKGSPEDNEQKQLFVEQHKHYLDEIIEQISEFSKRVILADANLDKVLSAYNKHRDKPIREQAENIIHLFTLTNLGAPAAFKYFDTTIDRKQYRSTKEVLDATLIHQSITGLYETRIDLSQLGGDEGADKRTADGSEFESPKKKRKV

SEQ ID NO: 163 - protein, 1588 aa, Artificial Sequence
  Description of Artificial Sequence: Synthetic polypeptide
MSEVEFSHEYWMRHALTLAKRARDEREVPVGAVLVLNNRVIGEGWNRAIGLHDPTAHAEIMALRQGGLVMQNYRLYDATLYVTFEPCVMCAGAMIHSRIGRVVFGVRNAKTGAAGSLMDVLHHPGMNHRVEITEGILADECAALLCRFFRMPRRVFNAQKKAQSSTDSGGSSGGSSGSETPGTSESATPESSGGSSGGSDKKYSIGLAIGTNSVGWAVITDEYKVPSKKFKVLGNTDRHSIKKNLIGALLFDSGETAEATRLKRTARRRYTRRKNRICYLQEIFSNEMAKVDDSFFHRLEESFLVEEDKKHERHPIFGNIVDEVAYHEKYPTIYHLRKKLVDSTDKADLRLIYLALAHMIKFRGHFLIEGDLNPDNSDVDKLFIQLVQTYNQLFEENPINASGVDAKAILSARLSKSRRLENLIAQLPGEKKNGLFGNLIALSLGLTPNFKSNFDLAEDAKLQLSKDTYDDDLDNLLAQIGDQYADLFLAAKNLSDAILLSDILRVNTEITKAPLSASMIKRYDEHHQDLTLLKALVRQQLPEKYKEIFFDQSKNGYAGYIDGGASQEEFYKFIKPILEKMDGTEELLVKLNREDLLRKQRTFDNGSIPHQIHLGELHAILRRQEDFYPFLKDNREKIEKILTFRIPYYVGPLARGNSRFAWMTRKSEETITPWNFEEVVDKGASAQSFIERMTNFDKNLPNEKVLPKHSLLYEYFTVYNELTKVKYVTEGMRKPAFLSGEQKKAIVDLLFKTNRKVTVKQLKEDYFKKIECFDSVEISGVEDRFNASLGTYHDLLKIIKDKDFLDNEENEDILEDIVLTLTLFEDREMIEERLKTYAHLFDDKVMKQLKRRRYTGWGRLSRKLINGIRDKQSGKTILDFLKSDGFANRNFMQLIHDDSLTFKEDIQKAQVSGQGDSLHEHIANLAGSPAIKKGILQTVKVVDELVKVMGRHKPENIVIEMARENQTTQKGQKNSRERMKRIEEGIKELGSQILKEHPVENTQLQNEKLYLYYLQNGRDMYVDQELDINRLSDYDVDHIVPQSFLKDDSIDNKVLTRSDKNRGKSDNVPSEEVVKKMKNYWRQLLNAKLITQRKFDNLTKAERGGLSELDKAGFIKRQLVETRQITKHVAQILDSRMNTKYDENDKLIREVKVITLKSKLVSDFRKDFQFYKVREINNYHHAHDAYLNAVVGTALIKKYPKLESEFVYGDYKVYDVRKMIAKSEQEIGKATAKYFFYSNIMNFFKTEITLANGEIRKRPLIETNGETGEIVWDKGRDFATVRKVLSMPQVNIVKKTEVQTGGFSKESILPKRNSDKLIARKKDWDPKKYGGFVSPTVAYSVLVVAKVEKGKSKKLKSVKELLGITIMERSSFEKNPIDFLEAKGYKEVKKDLIIKLPKYSLFELENGRKRMLASARELQKGNELALPSKYVNFLYLASHYEKLKGSPEDNEQKQLFVEQHKHYLDEIIEQISEFSKRVILADANLDKVLSAYNKHRDKPIREQAENIIHLFTLTNLGAPAAFKYFDTTIDRKQYRSTKEVLDATLIHQSITGLYETRIDLSQLGGDEGADKRTADGSEFESPKKKRKV

SEQ ID NO: 164 - protein, 1588 aa, Artificial Sequence
  Description of Artificial Sequence: Synthetic polypeptide
MSEVEFSHEYWMRHALTLAKRARDEREVPVGAVLVLNNRVIGEGWNRAIGLHDPTAHAEIMALRQGGLVMQNYRLIDATLYSTFEPCVMCAGAMIHSRIGRVVFGVRNAKTGAAGSLMDVLHYPGMNHRVEITEGILADECAALLCYFFRMPRRVFNAQKKAQSSTDSGGSSGGSSGSETPGTSESATPESSGGSSGGSDKKYSIGLAIGTNSVGWAVITDEYKVPSKKFKVLGNTDRHSIKKNLIGALLFDSGETAEATRLKRTARRRYTRRKNRICYLQEIFSNEMAKVDDSFFHRLEESFLVEEDKKHERHPIFGNIVDEVAYHEKYPTIYHLRKKLVDSTDKADLRLIYLALAHMIKFRGHFLIEGDLNPDNSDVDKLFIQLVQTYNQLFEENPINASGVDAKAILSARLSKSRRLENLIAQLPGEKKNGLFGNLIALSLGLTPNFKSNFDLAEDAKLQLSKDTYDDDLDNLLAQIGDQYADLFLAAKNLSDAILLSDILRVNTEITKAPLSASMIKRYDEHHQDLTLLKALVRQQLPEKYKEIFFDQSKNGYAGYIDGGASQEEFYKFIKPILEKMDGTEELLVKLNREDLLRKQRTFDNGSIPHQIHLGELHAILRRQEDFYPFLKDNREKIEKILTFRIPYYVGPLARGNSRFAWMTRKSEETITPWNFEEVVDKGASAQSFIERMTNFDKNLPNEKVLPKHSLLYEYFTVYNELTKVKYVTEGMRKPAFLSGEQKKAIVDLLFKTNRKVTVKQLKEDYFKKIECFDSVEISGVEDRFNASLGTYHDLLKIIKDKDFLDNEENEDILEDIVLTLTLFEDREMIEERLKTYAHLFDDKVMKQLKRRRYTGWGRLSRKLINGIRDKQSGKTILDFLKSDGFANRNFMQLIHDDSLTFKEDIQKAQVSGQGDSLHEHIANLAGSPAIKKGILQTVKVVDELVKVMGRHKPENIVIEMARENQTTQKGQKNSRERMKRIEEGIKELGSQILKEHPVENTQLQNEKLYLYYLQNGRDMYVDQELDINRLSDYDVDHIVPQSFLKDDSIDNKVLTRSDKNRGKSDNVPSEEVVKKMKNYWRQLLNAKLITQRKFDNLTKAERGGLSELDKAGFIKRQLVETRQITKHVAQILDSRMNTKYDENDKLIREVKVITLKSKLVSDFRKDFQFYKVREINNYHHAHDAYLNAVVGTALIKKYPKLESEFVYGDYKVYDVRKMIAKSEQEIGKATAKYFFYSNIMNFFKTEITLANGEIRKRPLIETNGETGEIVWDKGRDFATVRKVLSMPQVNIVKKTEVQTGGFSKESILPKRNSDKLIARKKDWDPKKYGGFVSPTVAYSVLVVAKVEKGKSKKLKSVKELLGITIMERSSFEKNPIDFLEAKGYKEVKKDLIIKLPKYSLFELENGRKRMLASARELQKGNELALPSKYVNFLYLASHYEKLKGSPEDNEQKQLFVEQHKHYLDEIIEQISEFSKRVILADANLDKVLSAYNKHRDKPIREQAENIIHLFTLTNLGAPAAFKYFDTTIDRKQYRSTKEVLDATLIHQSITGLYETRIDLSQLGGDEGADKRTADGSEFESPKKKRKV

SEQ ID NO: 165 - protein, 21 aa, Artificial Sequence
  Description of Artificial Sequence: Synthetic peptide
  MISC_FEATURE (1)..(21): This sequence may encompass 1, 3, or 7 "Gly Gly Ser" repeating units
GGSGGSGGSGGSGGSGGSGGS

SEQ ID NO: 166 - DNA, 23 bp, Unknown
  Description of Unknown: target sequence
gctggcagcaagggcggcgctgg

SEQ ID NO: 167 - DNA, 23 bp, Unknown
  Description of Unknown: target sequence
gcagccgcaccctcaagcaacgg

SEQ ID NO: 168 - DNA, 23 bp, Unknown
  Description of Unknown: target sequence
gtagctgactcactgctagctgg

SEQ ID NO: 169 - DNA, 23 bp, Unknown
  Description of Unknown: target sequence
gagtccgagcagaagaagaaggg

SEQ ID NO: 170 - DNA, 23 bp, Unknown
  Description of Unknown: target sequence
gatgagaaggagaagttcttagg

SEQ ID NO: 171 - RNA, 23 nt, Artificial Sequence
  Description of Artificial Sequence: Synthetic oligonucleotide
gcuggcagcaagggcggcgcugg

SEQ ID NO: 172 - RNA, 23 nt, Artificial Sequence
  Description of Artificial Sequence: Synthetic oligonucleotide
gcagccgcacccucaagcaacgg

SEQ ID NO: 173 - RNA, 23 nt, Artificial Sequence
  Description of Artificial Sequence: Synthetic oligonucleotide
guagcugacucacugcuagcugg

SEQ ID NO: 174 - RNA, 23 nt, Artificial Sequence
  Description of Artificial Sequence: Synthetic oligonucleotide
gaguccgagcagaagaagaaggg

SEQ ID NO: 175 - RNA, 23 nt, Artificial Sequence
  Description of Artificial Sequence: Synthetic oligonucleotide
gaugagaaggagaaguucuuagg

SEQ ID NO: 176 - RNA, 20 nt, Artificial Sequence
  Description of Artificial Sequence: Synthetic oligonucleotide
gacaagaaagggacugaagc

SEQ ID NO: 177 - RNA, 20 nt, Artificial Sequence
  Description of Artificial Sequence: Synthetic oligonucleotide
aucgacaagaaagggacuga

SEQ ID NO: 178 - RNA, 20 nt, Artificial Sequence
  Description of Artificial Sequence: Synthetic oligonucleotide
acacaccgguugguggccuc

SEQ ID NO: 179 - DNA, 28 bp, Unknown
  Description of Unknown: target sequence
  CDS (1)..(27)
atcgacaagaaagggactgaagctgctg

SEQ ID NO: 180 - protein, 9 aa, Unknown
  Description of Unknown: target sequence
IDKKGTEAA

SEQ ID NO: 181 - protein, 120 aa, Artificial Sequence
  Description of Artificial Sequence: Synthetic polypeptide
  MISC_FEATURE (1)..(120): This sequence may encompass 1-30 "Ser Gly Gly Ser" repeating units
SGGSSGGSSGGSSGGSSGGSSGGSSGGSSGGSSGGSSGGSSGGSSGGSSGGSSGGSSGGSSGGSSGGSSGGSSGGSSGGSSGGSSGGSSGGSSGGSSGGSSGGSSGGSSGGSSGGSSGGS

SEQ ID NO: 182 - protein, 120 aa, Artificial Sequence
  Description of Artificial Sequence: Synthetic polypeptide
  MISC_FEATURE (1)..(120): This sequence may encompass 1-30 "Gly Gly Gly Ser" repeating units
GGGSGGGSGGGSGGGSGGGSGGGSGGGSGGGSGGGSGGGSGGGSGGGSGGGSGGGSGGGSGGGSGGGSGGGSGGGSGGGSGGGSGGGSGGGSGGGSGGGSGGGSGGGSGGGSGGGSGGGS

SEQ ID NO: 183 - protein, 150 aa, Artificial Sequence
  Description of Artificial Sequence: Synthetic polypeptide
  MISC_FEATURE (1)..(150): This sequence may encompass 1-30 "Gly Gly Gly Gly Ser" repeating units
GGGGSGGGGSGGGGSGGGGSGGGGSGGGGSGGGGSGGGGSGGGGSGGGGSGGGGSGGGGSGGGGSGGGGSGGGGSGGGGSGGGGSGGGGSGGGGSGGGGSGGGGSGGGGSGGGGSGGGGSGGGGSGGGGSGGGGSGGGGSGGGGSGGGGS

SEQ ID NO: 184 - protein, 30 aa, Artificial Sequence
  Description of Artificial Sequence: Synthetic polypeptide
  MISC_FEATURE (1)..(30): This sequence may encompass 1-30 residues
GGGGGGGGGGGGGGGGGGGGGGGGGGGGGG

SEQ ID NO: 185 - protein, 150 aa, Artificial Sequence
  Description of Artificial Sequence: Synthetic polypeptide
  MISC_FEATURE (1)..(150): This sequence may encompass 1-30 "Glu Ala Ala Ala Lys" repeating units
EAAAKEAAAKEAAAKEAAAKEAAAKEAAAKEAAAKEAAAKEAAAKEAAAKEAAAKEAAAKEAAAKEAAAKEAAAKEAAAKEAAAKEAAAKEAAAKEAAAKEAAAKEAAAKEAAAKEAAAKEAAAKEAAAKEAAAKEAAAKEAAAKEAAAK

SEQ ID NO: 186 - protein, 90 aa, Artificial Sequence
  Description of Artificial Sequence: Synthetic polypeptide
  MISC_FEATURE (1)..(90): This sequence may encompass 1-30 "Gly Gly Ser" repeating units
GGSGGSGGSGGSGGSGGSGGSGGSGGSGGSGGSGGSGGSGGSGGSGGSGGSGGSGGSGGSGGSGGSGGSGGSGGSGGSGGSGGSGGSGGS

SEQ ID NO: 187 - protein, 60 aa, Artificial Sequence
  Description of Artificial Sequence: Synthetic polypeptide
  MISC_FEATURE (1)..(60): This sequence may encompass 1-30 "Xaa Pro" repeating units
  MOD_RES (1)..(1): Any amino acid
  MOD_RES (3)..(3): Any amino acid
  MOD_RES (5)..(5): Any amino acid
  MOD_RES (7)..(7): Any amino acid
  MOD_RES (9)..(9): Any amino acid
  MOD_RES (11)..(11): Any amino acid
  MOD_RES (13)..(13): Any amino acid
  MOD_RES (15)..(15): Any amino acid
  MOD_RES (17)..(17): Any amino acid
  MOD_RES (19)..(19): Any amino acid
  MOD_RES (21)..(21): Any amino acid
  MOD_RES (23)..(23): Any amino acid
  MOD_RES (25)..(25): Any amino acid
  MOD_RES (27)..(27): Any amino acid
  MOD_RES (29)..(29): Any amino acid
  MOD_RES (31)..(31): Any amino acid
  MOD_RES (33)..(33): Any amino acid
  MOD_RES (35)..(35): Any amino acid
  MOD_RES (37)..(37): Any amino acid
  MOD_RES (39)..(39): Any amino acid
  MOD_RES (41)..(41): Any amino acid
  MOD_RES (43)..(43): Any amino acid
  MOD_RES (45)..(45): Any amino acid
  MOD_RES (47)..(47): Any amino acid
  MOD_RES (49)..(49): Any amino acid
  MOD_RES (51)..(51): Any amino acid
  MOD_RES (53)..(53): Any amino acid
  MOD_RES (55)..(55): Any amino acid
  MOD_RES (57)..(57): Any amino acid
  MOD_RES (59)..(59): Any amino acid
XPXPXPXPXPXPXPXPXPXPXPXPXPXPXPXPXPXPXPXPXPXPXPXPXPXPXPXPXPXP
